(19) United States
(12) Patent Application Publication
(10) Pub. No.: US 2002/0040490 A1
(43) Pub. Date: Apr. 4, 2002

(54) Expressed sequences of arabidopsis thaliana

(76) Inventors: Jorn Gorlach, Durham, NC (US); Yong-Qiang An, San Diego, CA (US); Carol M. Hamilton, Apex, NC (US); Jennifer L. Price, Raleigh, NC (US); Tracy M. Raines, Durham, NC (US); Yang Yu, Martinsville, NJ (US); Joshua G. Rameaka, Durham, NC (US); Amy Page, Durham, NC (US); Abraham V. Mathew, Cary, NC (US); Brooke L. Ledford, Holly Springs, NC (US); Jeffrey P. Woessner, Hillsborough, NC (US); William David Haas, Durham, NC (US); Carlos A. Garcia, Carrboro, NC (US); Maja Kricker, Pittsboro, NC (US); Ted Slater, Apex, NC (US); Keith R. Davis, Durham, NC (US); Keith Allen, Cary, NC (US); Neil Hoffman, Chapel Hill, NC (US); Patrick Hurban, Raleigh, NC (US)

Correspondence Address: PARADIGM GENETICS, INC, 104 ALEXANDER DRIVE, BUILDING 2, P O BOX 14528, RTP, NC, 277094528

(21) Appl. No.: 09/770,423

(22) Filed: Jan. 26, 2001

Related U.S. Application Data
(60) Provisional application No. 60/178,512, filed on Jan. 27, 2000.

(51) Int. Cl. A01H 5/00; C12Q 1/00; C07H 21/04

(52) U.S. Cl. 800/288; 435/4; 536/23.2; 536/23.6

(57) ABSTRACT

Isolated nucleotide compositions and sequences are provided for Arabidopsis thaliana genes. The nucleic acid compositions find use in identifying homologous or related genes; in producing compositions that modulate the expression or function of its encoded protein, mapping functional regions of the protein; and in studying associated physiological pathways. The genetic sequences may also be used for the genetic manipulation of cells, particularly of plant cells. The encoded gene products and modified organisms are useful for screening of biologically active agents, e.g. fungicides, insecticides, etc.; for elucidating biochemical pathways; and the like.

### CROSS -REFERENCE TO RELATED APPLICATION

[0001] This application claims the benefit of U.S. Provisional Application 60/178,512 Filed Jan. 27, 2000.

### FIELD OF INVENTION

[0002] The invention is in the field of polynucleotide sequences of a plant, particularly sequences expressed in arabidopsis thaliana.

### BACKGROUND OF THE INVENTION

[0003] Plants and plant products have vast commercial importance in a wide variety of areas including food crops for human and animal consumption, flavor enhancers for food, and production of specialty chemicals for use in products such as medicaments and fragrances. In considering food crops for humans and livestock, genes such as those involved in a plants resistance to insects, plant viruses, and fungi; genes involved in pollination; and genes whose products enhance the nutritional value of the food, are of major importance. A number of such genes have been described, see, for example, McCaskill and Croteau (1999) Nature Biotechnol. 17:31-36.

[0004] Despite recent advances in methods for identification, cloning, and characterization of genes, much remains to be learned about plant physiology in general, including how plants produce many of the above-mentioned products; mechanisms for resistance to herbicides, insects, plant viruses, fungi; elucidation of genes involved in specific biosynthetic pathways; and genes involved in environmental tolerance, e.g., salt tolerance, drought tolerance, or tolerance to anaerobic conditions.

[0005] Arabidopsis thaliana is a model system for genetic, molecular and biochemical studies of higher plants. Features of this plant that make it a model system for genetic and molecular biology research include a small genome size, organized into five chromosomes and containing an estimated 20,000 genes, a rapid life cycle, prolific seed production and, since it is small, it can easily be cultivation in limited space. A. thaliana is a member of the mustard family (Brassicaceae) with a broad natural distribution throughout Europe, Asia, and North America. Many different ecotypes have been collected from natural populations and are available for experimental analysis. The entire life cycle, including seed germination, formation of a rosette plant, bolting of the main stem, flowering, and maturation of the first seeds, is completed in 6 weeks. A large number of mutant lines are available that affect nearly all aspects of its growth. These features greatly facilitate the isolation of fundamentally interesting and potentially important genes for agronomic development Most gene products from higher plants exhibit adequate sequence similarity to deduced amino acid sequences of other plant genes to permit assignment of probable gene function, if it is known, in any higher plant. It is likely that there will be very few protein-encoding angiosperm genes that do not have orthologs or paralogs in Arabidopsis. The developmental diversity of higher plants may be largely due to changes in the cis-regulatory sequences of transcriptional regulators and not in coding sequences.

[0006] Many advances reported over the past few years offer clear evidence that this plant is not only a very important model species for basic research, but also extremely valuable for applied plant scientists and plant breeders. Knowledge gained from Arabidopsis can be used directly to develop desired traits in plants of other species.

[0007] Relevant Literature Cold Spring Harbor Monograph 27 (1994) E. M. Meyerowitz and C. R. Somerville, eds. (CSH Laboratory Press). Annual Plant Reviews, Vol. 1: Arabidopsis (1998) M. Anderson and J. A. Roberts, eds. (CRC Press). Methods in Molecular Biology: Arabidopsis Protocols, Vol. 82 (1997) J. M. Martinez-Zapater and J. Salinas, eds. (CRC Press).

[0008] Mayer et al (1999) Nature 402(6763):769-77; Sequence and analysis of chromosome 4 of the plant Arabidopsis thaliana. Lin et al. (1999) 402(6763):761-8, Sequence and analysis of chromosome 2 of the plant Arabidopsis thaliana. Meinke et al. (1998) Science 282:662-682, Arabidopsis thaliana: a model plant for genome analysis. Somerville and Somerville (1999) Science 285:380-383, Plant functional genomics. Mozo et al. (1999) Nat. Genet. 22:271-275, A complete BAC-based physical map of the Arabidopsis thaliana genome.

### SUMMARY OF THE INVENTION

[0009] Novel nucleic acid sequences of Arabidopsis thaliana, their encoded polypeptides and variants thereof, genes corresponding to these nucleic acids, and proteins expressed by the genes, are provided.

[0010] The invention also provides diagnostic, prophylactic and therapeutic agents employing such novel nucleic acids, their corresponding genes or gene products, including expression constructs, probes, antisense constructs, and the like. The genetic sequences may also be used for the genetic manipulation of plant cells, particularly dicotyledonous plants. The encoded gene products and modified organisms are useful for introducing or improving disease resistance and stress tolerance into plants; screening of biologically active agents, e.g. fungicides, etc.; for elucidating biochemical pathways; and the like.

[0011] In one embodiment of the invention, a nucleic acid is provided that comprises a start codon; an optional intervening sequence; a coding sequence capable of hybridizing under stringent conditions as set forth in SEQ ID NO:1 to 999; and an goptional terminal sequence, wherein at least one of said optional sequences is present. Such a nucleic acid may correspond to naturally occurring Arabidopsis expressed sequences.

### DETAILED DESCRIPTION OF THE INVENTION

[0012] Novel nucleic acid sequences from Arabidopsis thaliana, their encoded polypeptides and variants thereof, genes corresponding to these nucleic acids and proteins expressed by the genes are provided. The invention also provides agents employing such novel nucleic acids, their corresponding genes or gene products, including expression constructs, probes, antisense constructs, and the like. The nucleotide sequences are provided in the attached SEQLIST.

[0013] Sequences include, but are not limited to, sequences that encode resistance proteins; sequences that encode tolerance factors; sequences encoding proteins or other factors that are involved, directly or indirectly in biochemical pathways such as metabolic or biosynthetic pathways, sequences involved in signal transduction, sequences involved in the regulation of gene expression, structural genes, and the like. Biosynthetic pathways of interest include, but are not limited to, biosynthetic pathways whose product (which may be an end product or an intermediate) is of commercial, nutritional, or medicinal value.

[0014] The sequences may be used in screening assays of various plant strains to determine the strains that are best capable of withstanding a particular disease or environmental stress. Sequences encoding activators and resistance proteins may be introduced into plants that are deficient in these sequences. Alternatively, the sequences may be introduced under the control of promoters that are convenient for induction of expression. The protein products may be used in screening programs for insecticides, fungicides and antibiotics to determine agents that mimic or enhance the resistance proteins. Such agents may be used in improved methods of treating crops to prevent or treat disease. The protein products may also be used in screening programs to identify agents which mimic or enhance the action of tolerance factors. Such agents may be used in improved methods of treating crops to enhance their tolerance to environmental stresses.

[0015] Still other embodiments of the invention provide methods for enhancing or inhibiting production of a biosynthetic product in a plant by introducing a nucleic acid of the invention into a plant cell, where the nucleic acid comprises sequences encoding a factor which is involved, directly or indirectly in a biosynthetic pathway whose products are of commercial, nutritional, or medicinal value include any factor, usually a protein or peptide, which regulates such a biosynthetic pathway; which is an intermediate in such a biosynthetic pathway; or which in itself is a product that increases the nutritional value of a food product; or which is a medicinal product; or which is any product of commercial value.

[0016] Transgenic plants containing the antisense nucleic acids of the invention are useful for identifying other mediators that may induce expression of proteins of interest; for establishing the extent to which any specific insect and/or pathogen is responsible for damage of a particular plant; for identifying other mediators that may enhance or induce tolerance to environmental stress; for identifying factors involved in biosynthetic pathways of nutritional, commercial, or medicinal value; or for identifying products of nutritional, commercial, or medicinal value.

[0017] In still other embodiments, the invention provides transgenic plants constructed by introducing a subject nucleic acid of the invention into a plant cell, and growing the cell into a callus and then into a plant; or, alternatively by breeding a transgenic plant from the subject process with a second plant to form an F1 or higher hybrid. The subject transgenic plants and progeny are used as crops for their enhanced disease resistance, enhanced traits of interest, for example size or flavor of fruit, length of growth cycle, etc., or for screening programs, e.g. to determine more effective insecticides, etc; used as crops which exhibit enhanced tolerance environmental stress; or used to produce a factor.

[0018] Those skilled in the art will recognize the agricultural advantages inherent in plants constructed to have either increased or decreased expression of resistance proteins; or increased or decreased tolerance to environmental factors; or which produce or over-produce one or more factors involved in a biosynthetic pathway whose product is of commercial, nutritional, or medicinal value. For example, such plants may have increased resistance to attack by predators, insects, pathogens, microorganisms, herbivores, mechanical damage and the like; may be more tolerant to environmental stress, e.g. may be better able to withstand drought conditions, freezing, and the like; or may produce a product not normally made in the plant, or may produce a product in higher than normal amounts, where the product has commercial, nutritional, or medicinal value. Plants which may be useful include dicotyledons and monocotyledons. Representative examples of plants in which the provided sequences may be useful include tomato, potato, tobacco, cotton, soybean, alfalfa, rape, and the like. Monocotyledons, more particularly grasses (Poaceae family) of interest, include, without limitation, Avena sativa (oat); Avena strigosa (black oat); Elymus (wild rye); Hordeum sp. including Hordeum vulgare (barley); Oryza sp., including Oryza glaberrima (African rice); Oryza longistaminata (long-staminate rice); Pennisetum americanum (pearl millet); Sorghum sp. (sorghum); Triticum sp., including Triticum aestivum (common wheat); Triticum durum (durum wheat); Zea mays (corn); etc.

### NUCLEIC ACID COMPOSITIONS

[0019] The following detailed description describes the nucleic acid compositions encompassed by the invention, methods for obtaining cDNA or genomic DNA encoding a full-length gene product, expression of these nucleic acids and genes; identification of structural motifs of the nucleic acids and genes; identification of the function of a gene product encoded by a gene corresponding to a nucleic acid of the invention; use of the provided nucleic acids as probes, in mapping, and in diagnosis; use of the corresponding polypeptides and other gene products to raise antibodies; use of the nucleic acids in genetic modification of plant and other species; and use of the nucleic acids, their encoded gene products, and modified organisms, for screening and diagnostic purposes.

[0020] The scope of the invention with respect to nucleic acid compositions includes, but is not necessarily limited to, nucleic acids having a sequence set forth in any one of SEQ ID NOS:1-999; nucleic acids that hybridize the provided sequences under stringent conditions; genes corresponding to the provided nucleic acids; variants of the provided nucleic acids and their corresponding genes, particularly those variants that retain a biological activity of the encoded gene product.

[0021] In one embodiment, the sequences of the invention provide a polypeptide coding sequence. The polypeptide coding sequence may correspond to a naturally expressed mRNA in Arabidopsis or other species, or may encode a fusion protein between one of the provided sequences and an exogenous protein coding sequence. The coding sequence is characterized by an ATG start codon, a lack of stop codons in-frame with the ATG, and a termination codon, that is, a continuous open frame is provided between the start and the stop codon. The sequence contained between the start and the stop codon will comprise a sequence capable of hybridizing under stringent conditions to a sequence set for in SEQ ID NO:1-999, and may comprise the sequence set forth in the Seqlist.

[0022] Other nucleic acid compositions contemplated by and within the scope of the present invention will be readily apparent to one of ordinary skill in the art when provided with the disclosure here.

[0023] The invention features nucleic acids that are derived from Arabidopsis thaliana. Novel nucleic acid compositions of the invention of particular interest comprise a sequence set forth in any one of SEQ ID NOS:1-999 or an identifying sequence thereof. An “identifying sequence” is a contiguous sequence of residues at least about 10 nt to about 20 nt in length, usually at least about 50 nt to about 100 nt in length, that uniquely identifies a nucleic acid sequence, e.g., exhibits less than 90%, usually less than about 80% to about 85% sequence identity to any contiguous nucleotide sequence of more than about 20 nt. Thus, the subject novel nucleic acid compositions include full length cDNAs or mRNAs that encompass an identifying sequence of contiguous nucleotides from any one of SEQ ID NOS:1-999.

[0024] The nucleic acids of the invention also include nucleic acids having sequence similarity or sequence identity. Nucleic acids having sequence similarity are detected by hybridization under low stringency conditions, for example, at 50° C. and 10XSSC (0.9 M NaCl/0.09 M sodium citrate) and remain bound when subjected to washing at 55° C. in 1XSSC. Sequence identity can be determined by hybridization under stringent conditions, for example, at 50° C. or higher and 0.1IXSSC (9 mM NaCl/0.9 mM sodium citrate). Hybridization methods and conditions are well known in the art, see U.S. Pat. No. 5,707,829. Nucleic acids that are substantially identical to the provided nucleic acid sequences, e.g. allelic variants, genetically altered versions of the gene, etc., bind to the provided nucleic acid sequences (SEQ ID NOS:1-999) under stringent hybridization conditions. By using probes, particularly labeled probes of DNA sequences, one can isolate homologous or related genes. The source of homologous genes can be any species, particularly grasses as previously described.

[0025] Preferably, hybridization is performed using at least 15 contiguous nucleotides of at least one of SEQ ID NOS:1-999. The probe will preferentially hybridize with a nucleic acid or mRNA comprising the complementary sequence, allowing the identification and retrieval of the nucleic acids of the biological material that uniquely hybridize to the selected probe. Probes of more than 15 nucleotides can be used, e.g. probes of from about 18 nucleotides up to the entire length of the provided nucleic acid sequences, but 15 nucleotides generally represents sufficient sequence for unique identification.

[0026] The nucleic acids of the invention also include naturally occurring variants of the nucleotide sequences, e.g. degenerate variants, allelic variants, etc. Variants of the nucleic acids of the invention are identified by hybridization of putative variants with nucleotide sequences disclosed herein, preferably by hybridization under stringent conditions For example, by using appropriate wash conditions, variants of the nucleic acids of the invention can be identified where the allelic variant exhibits at most about 25-30% base pair mismatches relative to the selected nucleic acid probe. In general, allelic variants contain 5-25% base pair mismatches, and can contain as little as even 2-5%, or 1-2% base pair mismatches, as well as a single base-pair mismatch.

[0027] The invention also encompasses homologs corresponding to the nucleic acids of SEQ ID NOS:1-999, where the source of homologous genes can be any related species, usually within the same genus or group. Homologs have substantial sequence similarity, e.g. at least 75% sequence identity, usually at least 90%, more usually at least 95% between nucleotide sequences. Sequence similarity is calculated based on a reference sequence, which may be a subset of a larger sequence, such as a conserved motif, coding region, flanking region, etc. A reference sequence will usually be at least about 18 contiguous nt long, more usually at least about 30 nt long, and may extend to the complete sequence that is being compared. Algorithms for sequence analysis are known in the art, such as BLAST, described in Altschul et al., J. Mol. Biol. (1990) 215:403-10.

[0028] In general, variants of the invention have a sequence identity greater than at least about 65%, preferably at least about 75%, more preferably at least about 85%, and can be greater than at least about 90% or more as determined by the Smith- Waterman homology search algorithm as implemented in MPSRCH program (Oxford Molecular). For the purposes of this invention, a preferred method of calculating percent identity is the Smith-Waterman algorithm, using the following. Global DNA sequence identity must be greater than 65% as determined by the Smith-Wateman homology search algorithm as implemented in MPSRCH program (Oxford Molecular) using an affine gap search with the following search parameters: gap open penalty, 12; and gap extention penalty, 1.

[0029] The subject nucleic acids can be cDNAs or genomic DNAs, as well as fragments thereof, particularly fragments that encode a biologically active gene product and/or are useful in the methods disclosed herein. The term “cDNA” as used herein is intended to include all nucleic acids that share the arrangement of sequence elements found in native mature mRNA species, where sequence elements are exons and 3′ and 5′ non-coding regions. Normally mRNA species have contiguous exons, with the introns, when present, being removed by nuclear RNA splicing, to create a continuous open reading frame encoding a polypeptide of the invention.

[0030] A genomic sequence of interest comprises the nucleic acid present between the initiation codon and the stop codon, as defined in the listed sequences, including all of the introns that are normally present in a native chromosome. It can further include the 3′ and 5′ untranslated regions found in the mature mRNA. It can further include specific transcriptional and translational regulatory sequences, such as promoters, enhancers, etc., including about 1 kb, but possibly more, of flanking genomic DNA at either the 5′ and 3′ end of the transcribed region. The genomic DNA can be isolated as a fragment of 100 kb or smaller; and substantially free of flanking chromosomal sequence. The genomic DNA flanking the coding region, either 3′ and 5′, or internal regulatory sequences as sometimes found in introns, contains sequences required for expression.

[0031] The nucleic acid compositions of the subject invention can encode all or a part of the subject expressed polypeptides. Double or single stranded fragments can be obtained from the DNA sequence by chemically synthesizing oligonucleotides in accordance with conventional methods, by restriction enzyme digestion, by PCR amplification, etc. Isolated nucleic acids and nucleic acid fragments of the invention comprise at least about 15 up to about 100 contiguous nucleotides, or up to the complete sequence provided in SEQ ID NOS:1-999. For the most part, fragments will be of at least 15 nt, usually at least 18 nt or 25 nt, and up to at least about 50 contiguous nt in length or more.

[0032] Probes specific to the nucleic acids of the invention can be generated using the nucleic acid sequences disclosed in SEQ ID NOS:1-999 and the fragments as described above. The probes can be synthesized chemically or can be generated from longer nucleic acids using restriction enzymes. The probes can be labeled, for example, with a radioactive, biotinylated, or fluorescent tag. Preferably, probes are designed based upon an identifying sequence of a nucleic acid of one of SEQ ID NOS:1-999. More preferably, probes are designed based on a contiguous sequence of one of the subject nucleic acids that remain unmasked following application of a masking program for masking low complexity (e.g., XBLAST) to the sequence., i.e. one would select an unmasked region, as indicated by the nucleic acids outside the poly-n stretches of the masked sequence produced by the masking program.

[0033] The nucleic acids of the subject invention are isolated and obtained in substantial purity, generally as other than an intact chromosome. Usually, the nucleic acids, either as DNA or RNA, will be obtained substantially free of other naturally-occurring nucleic acid sequences, generally being at least about 50%, usually at least about 90% pure and are typically recombinant, e.g., flanked by one or more nucleotides with which it is not normally associated on a naturally occurring chromosome.

[0034] The nucleic acids of the invention can be provided as a linear molecule or within a circular molecule. They can be provided within autonomously replicating molecules (vectors) or within molecules without replication sequences. They can be regulated by their own or by other regulatory sequences, as is known in the art. The nucleic acids of the invention can be introduced into suitable host cells using a variety of techniques which are available in the art, such as transferrin polycation-mediated DNA transfer, transfection with naked or encapsulated nucleic acids, liposome-mediated DNA transfer, intracellular transportation of DNA-coated latex beads, protoplast fusion, viral infection, electroporation, gene gun, calcium phosphate-mediated transfection, and the like.

[0035] The subject nucleic acid compositions can be used to, for example, produce polypeptides, as probes for the detection of mRNA of the invention in biological samples, e.g. extracts of cells, to generate additional copies of the nucleic acids, to generate ribozymes or antisense oligonucleotides, and as single stranded DNA probes or as triple-strand forming oligonucleotides. The probes described herein can be used to, for example, determine the presence or absence of the nucleic acid sequences as shown in SEQ ID NOS:1-999 or variants thereof in a sample. These and other uses are described in more detail below.

### USE OF NUCLEIC ACIDS AS CODING SEQUENCES

[0036] Naturally occurring Arabidopsis polypeptides or fragments thereof are encoded by the provided nucleic acids. Methods are known in the art to determine whether the complete native protein is encoded by a candidate nucleic acid sequence. Where the provided sequence encodes a fragment of a polypeptide, methods known in the art may be used to determine the remaining sequence. These approaches may utilize a bioinformatics approach, a cloning approach, extension of mRNA species, etc.

[0037] Substantial genomic sequence is available for Arabidopsis, and may be exploited for determining the complete coding sequence corresponding to the provided sequences. The region of the chromosome to which a given sequence is located may be determined by hybridization or by database searching. The genomic sequence is then searched upstream and downstream for the presence of intron/exon boundaries, and for motifs characteristic of transcriptional start and stop sequences, for example by using Genscan (Burge and Karlin (1997) J. Mol. Biol. 268:78-94); or GRAIL (Uberbacher and Mural (1991) P.N.A.S. 88:11261-1265).

[0038] Alternatively, nucleic acid having a sequence of one of SEQ ID NOS:1-999, or an identifying fragment thereof, is used as a hybridization probe to complementary molecules in a cDNA library using probe design methods, cloning methods, and clone selection techniques as known in the art. Libraries of cDNA are made from selected cells. The cells may be those of A. thaliana, or of related species. In some cases it will be desirable to select cells from a particular stage, e.g. seeds, leaves, infected cells, etc.

[0039] Techniques for producing and probing nucleic acid sequence libraries are described, for example, in Sambrook et al., Molecular Cloning: A Laboratory Manual, 2nd Ed., (1989) Cold Spring Harbor Press, Cold Spring Harbor, NY; and Current Protocols in Molecular Biology, (1987 and updates) Ausubel et al., eds. The cDNA can be prepared by using primers based on sequence from SEQ ID NOS:1-999. In one embodiment, the cDNA library can be made from only poly-adenylated mRNA. Thus, poly-T primers can be used to prepare cDNA from the mRNA.

[0040] Members of the library that are larger than the provided nucleic acids, and preferably that encompass the complete coding sequence of the native message, are obtained. In order to confirm that the entire cDNA has been obtained, RNA protection experiments are performed as follows. Hybridization of a full-length cDNA to an mRNA will protect the RNA from RNase degradation. If the cDNA is not full length, then the portions of the mRNA that are not hybridized will be subject to RNase degradation. This is assayed, as is known in the art, by changes in electrophoretic mobility on polyacrylamide gels, or by detection of released monoribonucleotides. Sambrook et al., Molecular Cloning: A Laboratory Manual, 2nd Ed., (1989) Cold Spring Harbor Press, Cold Spring Harbor, NY. In order to obtain additional sequences 5′ to the end of a partial cDNA, 5′ RACE (PCR Protocols: A Guide to Methods and Applications, (1990) Academic Press, Inc.) may be performed.

[0041] Genomic DNA is isolated using the provided nucleic acids in a manner similar to the isolation of full-length cDNAs. Briefly, the provided nucleic acids, or portions thereof, are used as probes to libraries of genomic DNA. Preferably, the library is obtained from the cell type that was used to generate the nucleic acids of the invention, but this is not essential. Such libraries can be in vectors suitable for carrying large segments of a genome, such as P1 or YAC, as described in detail in Sambrook et al., 9.4-9.30. In order to obtain additional 5′ or 3′ sequences, chromosome walking is performed, as described in Sambrook et al., such that adjacent and overlapping fragments of genomic DNA are isolated. These are mapped and pieced together, as is known in the art, using restriction digestion enzymes and DNA ligase.

[0042] PCR methods may be used to amplify the members of a cDNA library that comprise the desired insert. In this case, the desired insert will contain sequence from the full length cDNA that corresponds to the instant nucleic acids. Such PCR methods include gene trapping and RACE methods. Gene trapping entails inserting a member of a cDNA library into a vector. The vector then is denatured to produce single stranded molecules. Next, a substrate-bound probe, such a biotinylated oligo, is used to trap cDNA inserts of interest. Biotinylated probes can be linked to an avidin-bound solid substrate. PCR methods can be used to amplify the trapped cDNA. To trap sequences corresponding to the full length genes, the labeled probe sequence is based on the nucleic acid sequences of the invention. Random primers or primers specific to the library vector can be used to amplify the trapped cDNA. Such gene trapping techniques are described in Gruber et aL., WO 95/04745 and Gruber et aL, U.S. Pat. No. 5,500,356. Kits are commercially available to perform gene trapping experiments from, for example, Life Technologies, Gaithersburg, Md., USA.

[0043] “Rapid amplification of cDNA ends”, or RACE, is a PCR method of amplifying cDNAs from a number of different RNAs. The cDNAs are ligated to an oligonucleotide linker, and amplified by PCR using two primers. One primer is based on sequence from the instant nucleic acids, for which full length sequence is desired, and a second primer comprises sequence that hybridizes to the oligonucleotide linker to amplify the cDNA. A description of this methods is reported in WO 97/19110. A common primer may be designed to anneal to an arbitrary adaptor sequence ligated to cDNA ends. When a single gene-specific RACE primer is paired with the common primer, preferential amplification of sequences between the single gene specific primer and the common primer occurs. Commercial cDNA pools modified for use in RACE are available.

[0044] Once the full-length cDNA or gene is obtained, DNA encoding variants can be prepared by site-directed mutagenesis, described in detail in Sambrook et al., 15.3- 15.63. The choice of codon or nucleotide to be replaced can be based on disclosure herein on optional changes in amino acids to achieve altered protein structure and/or function. As an alternative method to obtaining DNA or RNA from a biological material, nucleic acid comprising nucleotides having the sequence of one or more nucleic acids of the invention can be synthesized.

### EXPRESSION OF POLYPEPTIDES

[0045] The provided nucleic acid, e.g. a nucleic acid having a sequence of one of SEQ ID NOS:1-999), the corresponding cDNA, the polypeptide coding sequence as described above, or the full-length gene is used to express a partial or complete gene product. Constructs of nucleic acids having sequences of SEQ ID NOS:1-999 can be generated by recombinant methods, synthetically, or in a single-step assembly of a gene and entire plasmid from large numbers of oligodeoxyribonucleotides is described by, e.g. Stemmer et aL, Gene (Amsterdam) (1995) 164(1):49-53.

[0046] Appropriate nucleic acid constructs are purified using standard recombinant DNA techniques as described in, for example, Sambrook et al., Molecular Cloning: A Laboratory Manual, 2nd Ed., (1989) Cold Spring Harbor Press, Cold Spring Harbor, NY. The gene product encoded by a nucleic acid of the invention is expressed in any expression system, including, for example, bacterial, yeast, insect, amphibian and mammalian systems.

[0047] The subject nucleic acid molecules are generally propagated by placing the molecule in a vector. Viral and non-viral vectors are used, including plasmids. The choice of plasmid will depend on the type of cell in which propagation is desired and the purpose of propagation. Certain vectors are useful for amplifying and making large amounts of the desired DNA sequence. Other vectors are suitable for expression in cells in culture. Still other vectors are suitable for transfer and expression in cells in a whole organism or person. The choice of appropriate vector is well within the skill of the art. Many such vectors are available commercially.

[0048] The nucleic acids set forth in SEQ ID NOS:1-999 or their corresponding full-length nucleic acids are linked to regulatory sequences as appropriate to obtain the desired expression properties. These can include promoters attached either at the 5′ end of the sense strand or at the 3′ end of the antisense strand, enhancers, terminators, operators, repressors, and inducers. The promoters can be regulated or constitutive. In some situations it may be desirable to use conditionally active promoters, such as tissue-specific or developmental stage-specific promoters. These are linked to the desired nucleotide sequence using the techniques described above for linkage to vectors. Any techniques known in the art can be used.

[0049] When any of the above host cells, or other appropriate host cells or organisms, are used to replicate and/or express the nucleic acids or nucleic acids of the invention, the resulting replicated nucleic acid, RNA, expressed protein or polypeptide, is within the scope of the invention as a product of the host cell or organism. The product is recovered by any appropriate means known in the art.

### IDENTIFICATION OF FUNCTIONAL AND STRUCTURAL MOTIFS

[0050] Translations of the nucleotide sequence of the provided nucleic acids, cDNAs or full genes can be aligned with individual known sequences. Similarity with individual sequences can be used to determine the activity of the polypeptides encoded by the nucleic acids of the invention. Also, sequences exhibiting similarity with more than one individual sequence can exhibit activities that are characteristic of either or both individual sequences.

[0051] The six possible reading frames may be translated using programs such as GCG pepdata, or GCG Frames (Wisconsin Package Version 10.0, Genetics Computer Group (GCG), Madison, Wis., USA. ). Programs such as ORFFinder (National Center for Biotechnology Information (NCBI) a division of the National Library of Medicine (NLM) at the National Institutes of Health (NIH) http://www.ncbi.nlm.nih.gov/) may be used to identify open reading frames (ORFs) in sequences. ORF finder identifies all possible ORFs in a DNA sequence by locating the standard and alternative stop and start codons. Other ORF identification programs include Genie (Kulp et al. (1996).

[0052] A generalized Hidden Markov Model may be used for the recognition of genes in DNA. (ISMB-96, St. Louis, MO, AAAI/MIT Press; Reese et aL. (1997), “Improved splice site detection in Genie”. Proceedings of the First Annual International Conference on Computational Molecular Biology RECOMB 1997, Santa Fe, N. Mex., ACM Press, New York., P. 34.); BESTORF --Prediction of potential coding fragment in human or plant EST/mRNA sequence data using Markov Chain Models; and FGENEP—Multiple genes structure prediction in plant genomic DNA (Solovyev et al. (1995) Identification of human gene structure using linear discriminant functions and dynamic programming. In Proceedings of the Third International Conference on Intelligent Systems for Molecular Biology eds. Rawling et aL Cambridge, England, AAAI Press,367-375.; Solovyev et aL. (1994) Nucl. Acids Res. 22(24):5156-5163; Solovyev et al,. The prediction of human exons by oligonucleotide composition and discriminant analysis of spliceable open reading frames, in: The Second International conference on Intelligent systems for Molecular Biology (eds. Altman et al.), AAAI Press, Menlo Park, CA (1994, 354-362) Solovyev and Lawrence, Prediction of human gene structure using dynamic programming and oligonucleotide composition, In: Abstracts of the 4th annual Keck symposium. Pittsburgh, 47,1993; Burge and Karlin (1997) J. Mol. Biol. 268:78-94; Kulp et al. (1996) Proc. Conf. on Intelligent Systems in Molecular Biology '96, 134-142).

[0053] The full length sequences and fragments of the nucleic acid sequences of the nearest neighbors can be used as probes and primers to identify and isolate the full length sequence corresponding to provided nucleic acids. Typically, a selected nucleic acid is translated in all six frames to determine the best alignment with the individual sequences. These amino acid sequences are referred to, generally, as query sequences, which are aligned with the individual sequences. Suitable databases include Genbank, EMBL, and DNA Database of Japan (DDBJ).

[0054] Query and individual sequences can be aligned using the methods and computer programs described above, and include BLAST, available by ftp at ftp://ncbi.nim.nih.gov/.

[0055] Gapped BLAST and PSI-BLAST are useful search tools provided by NCBI. (version 2.0) (Altschul et al., 1997). Position-Specific Iterated BLAST (PSI-BLAST) provides an automated, easy-to-use version of a “profile” search, which is a sensitive way to look for sequence homologues. The program first performs a gapped BLAST database search. The PSI-BLAST program uses the information from any significant alignments returned to construct a position-specific score matrix, which replaces the query sequence for the next round of database searching. PSI-BLAST may be iterated until no new significant alignments are found. The Gapped BLAST algorithm allows gaps (deletions and insertions) to be introduced into the alignments that are returned. Allowing gaps means that similar regions are not broken into several segments. The scoring of these gapped alignments tends to reflect biological relationships more closely. The Smith-Waterman is another algorithm that produces local or global gapped sequence alignments, see Meth. Mol. Biol. (1997) 70: 173- 187. Also, the GAP program using the Needleman and Wunsch global alignment method can be utilized for sequence alignments.

[0056] Results of individual and query sequence alignments can be divided into three categories, high similarity, weak similarity, and no similarity. Individual alignment results ranging from high similarity to weak similarity provide a basis for determining polypeptide activity and/or structure. Parameters for categorizing individual results include: percentage of the alignment region length where the strongest alignment is found, percent sequence identity, and e value.

[0057] The percentage of the alignment region length is calculated by counting the number of residues of the individual sequence found in the region of strongest alignment, e.g. contiguous region of the individual sequence that contains the greatest number of residues that are identical to the residues of the corresponding region of the aligned query sequence. This number is divided by the total residue l ength of the query sequence to calculate a percentage. For example, a query sequence of 20 amino acid residues might be aligned with a 20 amino acid region of an individual sequence. The individual sequence might be identical to amino acid residues 5, 9-15, and 17-19 of the query sequence. The region of strongest alignment is thus the region stretching from residue 9-19, an 11 amino acid stretch. The percentage of the alignment region length is: 11 (length of the region of strongest alignment) divided by (query sequence length) 20 or 55%.

[0058] Percent sequence identity is calculated by counting the number of amino acid matches between the query and individual sequence and dividing total number of matches by the number of residues of the individual sequences found in the region of strongest alignment. Thus, the percent identity in the example above would be 10 matches divided by 11 amino acids, or approximately, 90.9%

[0059] E value is the probability that the alignment was produced by chance. For a single alignment, the e value can be calculated according to Karlin et al., Proc. NatI. Acad. Sci. (1990) 87:2264 and Karlin et al., Proc. Natl. Acad. Sci. (1993) 90. The e value of multiple alignments using the same query sequence can be calculated using an heuristic approach described in Altschul et al., Nat. Genet. (1994) 6:119. Alignment programs such as BLAST program can calculate the e value.

[0060] Another factor to consider for determining identity or similarity is the location of the similarity or identity. Strong local alignment can indicate similarity even if the length of alignment is short. Sequence identity scattered throughout the length of the query sequence also can indicate a similarity between the query and profile sequences. The boundaries of the region where the sequences align can be determined according to Doolittle, supra; BLAST or FASTA programs; or by determining the area where sequence identity is highest.

[0061] In general, in alignment results considered to be of high similarity, the percent of the alignment region length is typically at least about 55% of total length query sequence; more typically, at least about 58%; even more typically; at least about 60% of the total residue length of the query sequence. Usually, percent length of the alignment region can be as much as about 62%; more usually, as much as about 64%; even more usually, as much as about 66%. Further, for high similarity, the region of alignment, typically, exhibits at least about 75% of sequence identity; more typically, at least about 78%; even more typically; at least about 80% sequence identity. Usually, percent sequence identity can be as much as about 82%; more usually, as much as about 84%; even more usually, as much as about 86%.

[0062] The p value is used in conjunction with these methods. The query sequence is considered to have a high similarity with a profile sequence when the p value is less than or equal to 10⁻². Confidence in the degree of similarity between the query sequence and the profile sequence increases as the p value become smaller.

[0063] In general, where alignment results considered to be of weak similarity, there is no minimum percent length of the alignment region nor minimum length of alignment. A better showing of weak similarity is considered when the region of alignment is, typically, at least about 15 amino acid residues in length; more typically, at least about 20; even more typically; at least about 25 amino acid residues in length. Usually, length of the alignment region can be as much as about 30 amino acid residues; more usually, as much as about 40; even more usually, as much as about 60 amino acid residues. Further, for weak similarity, the region of alignment, typically, exhibits at least about 35% of sequence identity; more typically, at least about 40%; even more typically; at least about 45% sequence identity. Usually, percent sequence identity can be as much as about 50%; more usually, as much as about 55%; even more usually, as much as about 60%.

[0064] The query sequence is considered to have a low similarity with a profile sequence when the p value is greater than 10⁻². Confidence in the degree of similarity between the query sequence and the profile sequence decreases as the p values become larger.

[0065] Sequence identity alone can be used to determine similarity of a query sequence to an individual sequence and can indicate the activity of the sequence. Such an alignment, preferably, permits gaps to align sequences. Typically, the query sequence is related to the profile sequence if the sequence identity over the entire query sequence is at least about 15%; more typically, at least about 20%; even more typically, at least about 25%; even more typically, at least about 50%. Sequence identity alone as a measure of similarity is most useful when the query sequence is usually, at least 80 residues in length; more usually, 90 residues; even more usually, at least 95 amino acid residues in length. More typically, similarity can be concluded based on sequence identity alone when the query sequence is preferably 100 residues in length; more preferably, 120 residues in length; even more preferably, 150 amino acid residues in length.

[0066] It is apparent, when studying protein sequence families, that some regions have been better conserved than others during evolution. These regions are generally important for the function of a protein and/or for the maintenance of its three-dimensional structure. By analyzing the constant and variable properties of such groups of similar sequences, it is possible to derive a signature for a protein family or domain, which distinguishes its members from all other unrelated proteins. A pertinent analogy is the use of fingerprints by the police for identification purposes. A fingerprint is generally sufficient to identify a given individual. Similarly, a protein signature can be used to assign a new sequence to a specific family of proteins and thus to formulate hypotheses about its function. The PROSITE database is a compendium of such fingerprints (motifs) and may be used with search software such as Wisconsin GCG Motifs to find motifs or fingerprints in query sequences. PROSITE currently contains signatures specific for about a thousand protein families or domains. Each of these signatures comes with documentation providing background information on the structure and function of these proteins (Hofmann et al. (1999) Nucleic Acids Res. 27:215-219; Bucher and Bairoch ., A generalized profile syntax for biomolecular sequences motifs and its function in automatic sequence interpretation (In) ISMB-94; Proceedings 2nd International Conference on Intelligent Systems for Molecular Biology; Altman et al. Eds. (1994), pp 53-61, AAAI Press, Menlo Park).

[0067] Translations of the provided nucleic acids can be aligned with amino acid profiles that define either protein families or common motifs. Also, translations of the E provided nucleic acids can be aligned to multiple sequence alignments (MSA) comprising the polypeptide sequences of members of protein families or motifs. Similarity or identity with profile sequences or MSAs can be used to determine the activity of the gene products (e.g., polypeptides) encoded by the provided nucleic acids or corresponding cDNA or genes.

[0068] Profiles can designed manually by (1) creating an MSA, which is an alignment of the amino acid sequence of members that belong to the family and (2) constructing a statistical representation of the alignment. Such methods are described, for example, in Birney et al., Nucl. Acid Res. (1996) 24(14): 2730-2739. MSAs of some protein families and motifs are available for downloading to a local server. For example, the PFAM database with MSAs of 547 different families and motifs, and the software (HMMER) to search the PFAM database may be downloaded from ftp://ftp.genetics.wustl.edu/pub/eddy/pfam-4.4/ to allow secure searches on a local server. Pfam is a database of multiple alignments of protein domains or conserved protein regions., which represent evolutionary conserved structure that has implications for the proteins function (Sonnhammer et al. (1998) Nucl. Acid Res. 26:320-322; Bateman et aL. (1999) Nucleic Acids Res. 27:260-262).

[0069] The 3D_ali databank (Pasarella, S. and Argos, P. (1992) Prot. Engineering 5:121-137) was constructed to incorporate new protein structural and sequence data. The databank has proved useful in many research fields such as protein sequence and structure analysis and comparison, protein folding, engineering and design and evolution. The collection enhances present protein structural knowledge by merging information from proteins of similar main-chain fold with homologous primary structures taken from large databases of all known sequences. 3D_ali databank files may be downloaded to a secure local server from http://www.embl-heidelberg.de/argos/ali/ali_form.html.

[0070] The identify and function of the gene that correlates to a nucleic acid described herein can be determined by screening the nucleic acids or their corresponding amino acid sequences against profiles of protein families. Such profiles focus on common structural motifs among proteins of each family. Publicly available profiles are known in the art.

[0071] In comparing a novel nucleic acid with known sequences, several alignment tools are available. Examples include PileUp, which creates a multiple sequence alignment, and is described in Feng et al., J. Mol. Evol. (1987) 25:351. Another method, GAP, uses the alignment method of Needleman et al., J. Mol. Biol. (1970) 48:443. GAP is best suited for global alignment of sequences. A third method, BestFit, functions by inserting gaps to maximize the number of matches using the local homology algorithm of Smith et al. (1981) Adv. Appl. Math. 2:482.

### IDENTIFICATION OF SECRETED & MEMBRANE-BOUND POLYPEPTIDES

[0072] Secreted and membrane-bound polypeptides of the present invention are of interest. Because both secreted and membrane-bound polypeptides comprise a fragment of contiguous hydrophobic amino acids, hydrophobicity predicting algorithms can be used to identify such polypeptides. A signal sequence is usually encoded by both secreted and membrane-bound polypeptide genes to direct a polypeptide to the surface of the cell. The signal sequence usually comprises a stretch of hydrophobic residues. Such signal sequences can fold into helical structures. Membrane-bound polypeptides typically comprise at least one transmembrane region that possesses a stretch of hydrophobic amino acids that can transverse the membrane. Some transmembrane regions also exhibit a helical structure. Hydrophobic fragments within a polypeptide can be identified by using computer algorithms. Such algorithms include Hopp & Woods, Proc. Natl. Acad. Sci. USA (1981) 78:3824-3828; Kyte & Doolittle, J. Mol. Biol. (1982) 157: 105-132; and RAOAR algorithm, Degli Esposti et al., Eur. J. Biochem. (1990) 190: 207-219.

[0073] Another method of identifying secreted and membrane-bound polypeptides is to translate the nucleic acids of the invention in all six frames and determine if at least 8 contiguous hydrophobic amino acids are present. Those translated polypeptides with at least 8; more typically, 10; even more typically, 12 contiguous hydrophobic amino acids are considered to be either a putative secreted or membrane bound polypeptide. Hydrophobic amino acids include alanine, glycine, histidine, isoleucine, leucine, lysine, methionine, phenylalanine, proline, threonine, tryptophan, tyrosine, and valine.

### IDENTIFICATION OF THE FUNCTION OF AN EXPRESSION PRODUCT

[0074] The biological function of the encoded gene product of the invention may be determined by empirical or deductive methods. One promising avenue, termed phylogenomics, exploits the use of evolutionary information to facilitate assignment of gene function. The approach is based on the idea that functional predictions can be greatly improved by focusing on how genes became similar in sequence during evolution instead of focusing on the sequence similarity itself. One of the major efficiencies that has emerged from plant genome research to date is that a large percentage of higher plant genes can be assigned some degree of function by comparing them with the sequences of genes of known function.

[0075] Alternatively, “reverse genetics” is used to identify gene function. Large collections of insertion mutants are available for Arabidopsis, maize, petunia, and snapdragon. These collections can be screened for an insertional inactivation of any gene by using the polymerase chain reaction (PCR) primed with oligonucleotides based on the sequences of the target gene and the insertional mutagen. The presence of an insertion in the target gene is indicated by the presence of a PCR product. By multiplexing DNA samples, hundreds of thousands of lines can be screened and the corresponding mutant plants can be identified with relatively small effort. Analysis of the phenotype and other properties of the corresponding mutant will provide an insight into the function of the gene.

[0076] In one method of the invention, the gene function in a transgenic Arabidopsis plant is assessed with anti-sense constructs. A high degree of gene duplication is apparent in Arabidopsis, andmany of the gene duplications in Arabidopsis are very tightly linked. Large numbers of transgenic Arabidopsis plants can be generated by infecting flowers with Agrobacterium tumefaciens containing an insertional mutagen, a method of gene silencing based on producing double-stranded RNA from bidirectional transcription of genes in transgenic plants can be broadly useful for high-throughput gene inactivation (Clough and Bent (1999) Plant J. 17; Waterhouse et al. (1998) Proc. Natl. Acad. Sci. U.S.A. 95:13959). This method may use promoters that are expressed in only a few cell types or at a particular developmental stage or in response to an external stimulus. This could significantly obviate problems associated with the lethality of some mutations.

[0077] Virus-induced gene silencing may also find use for suppressing gene function. This method exploits the fact that some or all plants have a surveillance system that can specifically recognize viral nucleic acids and mount a sequence-specific suppression of viral RNA accumulation. By inoculating plants with a recombinant virus containing part of a plant gene, it is possible to rapidly silence the endogenous plant gene.

[0078] Antisense nucleic acids are designed to specifically bind to RNA, resulting in the formation of RNA-DNA or RNA-RNA hybrids, with an arrest of DNA replication, reverse transcription or messenger RNA translation. Antisense nucleic acids based on a selected nucleic acid sequence can interfere with expression of the corresponding gene. Antisense nucleic acids are typically generated within the cell by expression from antisense constructs that contain the antisense strand as the transcribed strand. Antisense nucleic acids based on the disclosed nucleic acids will bind and/or interfere with the translation of mRNA comprising a sequence complementary to the antisense nucleic acid. The expression products of control cells and cells treated with the antisense construct are compared to detect the protein product of the gene corresponding to the nucleic acid upon which the antisense construct is based. The protein is isolated and identified using routine biochemical methods.

[0079] As an alternative method for identifying function of the gene corresponding to a nucleic acid disclosed herein, dominant negative mutations are readily generated for corresponding proteins that are active as homomultimers. A mutant polypeptide will interact with wild-type polypeptides (made from the other allele) and form a non-functional multimer. Thus, a mutation is in a substrate-binding domain, a catalytic domain, or a cellular localization domain. Preferably, the mutant polypeptide will be overproduced. Point mutations are made that have such an effect. In addition, fusion of different polypeptides of various lengths to the terminus of a protein can yield dominant negative mutants. General strategies are available for making dominant negative mutants (see for example, Herskowitz (1987) Nature 329:219). Such techniques can be used to create loss of function mutations, which are useful for determining protein function.

[0080] Another approach for discovering the function of genes utilizes gene chips and microarrays. DNA sequences representing all the genes in an organism can be placed on miniature solid supports and used as hybridization substrates to quantitate the expression of all the genes represented in a complex mRNA sample. This information is used to provide extensive databases of quantitative information about the degree to which each gene responds to pathogens, pests, drought, cold, salt, photoperiod, and other environmental variation. Similarly, one obtains extensive information about which genes respond to changes in developmental processes such as germination and flowering. One can therefore determine which genes respond to the phytohormones, growth regulators, safeners, herbicides, and related agrichemicals. These databases of gene expression information provide insights into the “pathways” of genes that control complex responses. The accumulation of DNA microarray or gene chip data from many different experiments creates a powerful opportunity to assign functional information to genes of otherwise unknown function. The conceptual basis of the approach is that genes that contribute to the same biological process will exhibit similar patterns of expression. Thus, by clustering genes based on the similarity of their relative levels of expression in response to diverse stimuli or developmental or environmental conditions, it is possible to assign functions to many genes based on the known function of other genes in the cluster.

### CONSTRUCTION OF POLYPEPTIDES OF THE INVENTION AND VARIANTS THEREOF

[0081] The polypeptides of the invention include those encoded by the disclosed nucleic acids. These polypeptides can also be encoded by nucleic acids that, by virtue of the degeneracy of the genetic code, are not identical in sequence to the disclosed nucleic acids. Thus, the invention includes within its scope a polypeptide encoded by a nucleic acid having the sequence of any one of SEQ ID NOS: 1-999 or a variant thereof.

[0082] In general, the term “polypeptide” as used herein refers to both the full length polypeptide encoded by the recited nucleic acid, the polypeptide encoded by the gene represented by the recited nucleic acid, as well as portions or fragments thereof. “Polypeptides” also includes variants of the naturally occurring proteins, where such variants are homologous or substantially similar to the naturally occurring protein, and can be of an origin of the same or different species as the naturally occurring protein. In general, variant polypeptides have a sequence that has at least about 80%, usually at least about 90%, and more usually at least about 98% sequence identity with a differentially expressed polypeptide of the invention, as measured by BLAST using the parameters described above. The variant polypeptides can be naturally or non-naturally glycosylated, i.e., the polypeptide has a glycosylation pattern that differs from the glycosylation pattern found in the corresponding naturally occurring protein.

[0083] In general, the polypeptides of the subject invention are provided in a non-naturally occurring environment, e.g. are separated from their naturally occurring environment. In certain embodiments, the subject protein is present in a composition that is enriched for the protein as compared to a control. As such, purified polypeptide is provided, where by purified is meant that the protein is present in a composition that is substantially free of non-differentially expressed polypeptides, where by substantially free is meant that less than 90%, usually less than 60% and more usually less than 50% of the composition is made up of non-differentially expressed polypeptides.

[0084] Also within the scope of the invention are variants; variants of polypeptides include mutants, fragments, and fusions. Mutants can include amino acid substitutions, additions or deletions. The amino acid substitutions can be conservative amino acid substitutions or substitutions to eliminate non-essential amino acids, such as to alter a glycosylation site, a phosphorylation site or an acetylation site, or to minimize misfolding by substitution or deletion of one or more cysteine residues that are not necessary for function. Conservative amino acid substitutions are those that preserve the general charge, hydrophobicity/hydrophilicity, and/or steric bulk of the amino acid substituted.

[0085] Variants also include fragments of the polypeptides disclosed herein, particularly biologically active fragments and/or fragments corresponding to functional domains. Fragments of interest will typically be at least about 10 amino acids (aa) to at least about 15 aa in length, usually at least about 50 aa in length, and can be as long as 300 aa in length or longer, but will usually not exceed about 1000 aa in length, where the fragment will have a stretch of amino acids that is identical to a polypeptide encoded by a nucleic acid having a sequence of any SEQ ID NOS:1-999, or a homolog thereof.

[0086] The protein variants described herein are encoded by nucleic acids that are within the scope of the invention. The genetic code can be used to select the appropriate codons to construct the corresponding variants.

### LIBRARIES AND ARRAYS

[0087] In general, a library of biopolymers is a collection of sequence information, which information is provided in either biochemical form (e.g., as a collection of nucleic acid or polypeptide molecules), or in electronic form (e.g., as a collection of genetic sequences stored in a computer-readable form, as in a computer system and/or as part of a computer program). The term biopolymer, as used herein, is intended to refer to polypeptides, nucleic acids, and derivatives thereof, which molecules are characterized by the possession of genetic sequences either corresponding to, or encoded by, the sequences set forth in the provided sequence list (seqlist). The sequence information can be used in a variety of ways, e.g., as a resource for gene discovery, as a representation of sequences expressed in a selected cell type, e.g. cell type markers, etc.

[0088] The nucleic acid libraries of the subject invention include sequence information of a plurality of nucleic acid sequences, where at least one of the nucleic acids has a sequence of any of SEQ ID NOS:1-999. By plurality is meant one or more, usually at least 2 and can include up to all of SEQ ID NOS:1-999. The length and number of nucleic acids in the library will vary with the nature of the library, e.g., if the library is an oligonucleotide array, a cDNA array, a computer database of the sequence information, etc.

[0089] Where the library is an electronic library, the nucleic acid sequence information can be present in a variety of media. “Media” refers to a manufacture, other than an isolated nucleic acid molecule, that contains the sequence information of the present invention. Such a manufacture provides the sequences or a subset thereof in a form that can be examined by means not directly applicable to the sequence as it exists in a nucleic acid. For example, the nucleotide sequence of the present invention, e.g. the nucleic acid sequences of any of the nucleic acids of SEQ ID NOS:1-999, can be recorded on computer readable media, e.g. any medium that can be read and accessed directly by a computer. Such media include, but are not limited to: magnetic storage media, such as a floppy disc, a hard disc storage medium, and a magnetic tape; optical storage media such as CD-ROM; electrical storage media such as RAM and ROM; and hybrids of these categories such as magnetic/optical storage media. One of skill in the art can readily appreciate how any of the presently known computer readable mediums can be used to create a manufacture comprising a recording of the present sequence information. “Recorded” refers to a process for storing information on computer readable medium, using any such methods as known in the art. Any convenient data storage structure can be chosen, based on the means used to access the stored information. A variety of data processor programs and formats can be used for storage, e.g. word processing text file, database format, etc. In addition to the sequence information, electronic versions of the libraries of the invention can be provided in conjunction or connection with other computer-readable information and/or other types of computer- readable files (e.g., searchable files, executable files, etc, including, but not limited to, for example, search program software, etc.)

[0090] By providing the nucleotide sequence in computer readable form, the information can be accessed for a variety of purposes. Computer software to access sequence information is publicly available. For example, the BLAST (Altschul et al., supra.) and BLAZE (Brutlag et al. Comp. Chem. (1993) 17:203) search algorithms on a Sybase system can be used identify open reading frames (ORFs) within the genome that contain homology to ORFs from other organisms.

[0091] As used herein, “a computer-based system” refers to the hardware means, software means, and data storage means used to analyze the nucleotide sequence information of the present invention. The minimum hardware of the computer-based systems of the present invention comprises a central processing unit (CPU), input means, output means, and data storage means. A skilled artisan can readily appreciate that any one of the currently available computer-based system are suitable for use in the present invention. The data storage means can comprise any manufacture comprising a recording of the present sequence information as described above, or a memory access means that can access such a manufacture.

[0092] “Search means” refers to one or more programs implemented on the computer-based system, to compare a target sequence or target structural motif with the stored sequence information. Search means are used to identify fragments or regions of the genome that match a particular target sequence or target motif. A variety of known algorithms are publicly known and commercially available, e.g. MacPattern (EMBL), BLASTN, BLASTX (NCBI) and tBLASTX. A target sequence can be any DNA or amino acid sequence of six or more nucleotides or two or more amino acids, preferably from about 10 to 100 amino acids or from about 30 to 300 nucleotide residues.

[0093] “A target structural motif,” or “target motif,” refers to any rationally selected sequence or combination of sequences in which the sequence(s) are chosen based on a three-dimensional configuration that is formed upon the folding of the target motif, or on consensus sequences of regulatory or active sites. There are a variety of target motifs known in the art. Protein target motifs include, but arc not limited to, enzyme active sites and signal sequences. Nucleic acid target motifs include, but are not limited to, hairpin structures, promoter sequences and other expression elements such as binding sites for transcription factors.

[0094] A variety of structural formats for the input and output means can be used to input and output the information in the computer-based systems of the present invention. One format for an output means ranks fragments of the genome possessing varying degrees of homology to a target sequence or target motif. Such presentation provides a skilled artisan with a ranking of sequences and identifies the degree of sequence similarity contained in the identified fragment.

[0095] A variety of comparing means can be used to compare a target sequence or target motif with the data storage means to identify sequence fragments of the genome. A skilled artisan can readily recognize that any one of the publicly available homology search programs can be used as the search means for the computer based systems of the present invention.

[0096] As discussed above, the “library” of the invention also encompasses biochemical libraries of the nucleic acids of SEQ ID NOS:1-999, e.g., collections of nucleic acids representing the provided nucleic acids. The biochemical libraries can take a variety of forms, e.g. a solution of cDNAs, a pattern of probe nucleic acids stably bound to a surface of a solid support (microarray) and the like. By array is meant an article of manufacture that has a solid support or substrate with one or more nucleic acid targets on one of its surfaces, where the number of distinct nucleic may be in the hundreds, thousand, or tens of thousands. Each nucleic acid will comprise at 18 nt and often at least 25 nt, and often at least 100 to 1000 nucleotides, and may represent up to a complete coding sequence or cDNA.. A variety of different array formats have been developed and are known to those of skill in the art. The arrays of the subject invention find use in a variety of applications, including gene expression analysis, drug screening, mutation analysis and the like, as disclosed in the above-listed exemplary patent documents.

[0097] In addition to the above nucleic acid libraries, analogous libraries of polypeptides are also provided, where the where the polypeptides of the library will represent at least a portion of the polypeptides encoded by SEQ ID NOS:1-999.

### GENETICALLY ALTERED CELLS AND TRANSGENIcS

[0098] The subject nucleic acids can be used to create genetically modified and transgenic organisms, usually plant cells and plants, which may be monocots or dicots. The term transgenic, as used herein, is defined as an organism into which an exogenous nucleic acid construct has been introduced, generally the exogenous sequences are stably maintained in the genome of the organism. Of particular interest are transgenic organisms where the genomic sequence of germ line cells has been stably altered by introduction of an exogenous construct.

[0099] Typically, the transgenic organism is altered in the genetic expression of the introduced nucleotide sequences as compared to the wild-type, or unaltered organism. For example, constructs that provide for over-expression of a targeted sequence, sometimes referred to as a “knock-in”, provide for increased levels of the gene product. Alternatively, expression of the targeted sequence can be down- regulated or substantially eliminated by introduction of a “knock-out” construct, which may direct transcription of an anti-sense RNA that blocks expression of the naturally occurring mRNA, by deletion of the genomic copy of the targeted sequence, etc.

[0100] In one method, large numbers of genes are simultaneously introduced in order to explore the genetic basis of complex traits, for example by making plant artificial chromosome (PLAC) libraries. The centromeres in Arabidopsis have been mapped and current genome sequencing efforts will extend through these regions. Because Arabidopsis telomeres are very similar to those in yeast one may use a hybrid sequence of alternating plant and yeast sequences that function in both types of organisms, developing yeast artificial chromosome-PLAC libraries, and then introducing them into a suitable plant host to evaluate the phenotypic consequences. By providing a defined chromosomal environment for cloned genes, the use of PLACs may also enhance the ability to produce transgenic plants with defined levels of gene expression.

[0101] It has been found in many organisms that there is significant redundancy in the representation of genes in a genome. That is, a particular gene function is likely by represented by multiple copies of similar coding sequences in the genome. These copies are typically conserved in the amino acid sequence, but may diverge in the sequence of non-translated sequences, and in their codon usage. In order to knock out a particular genetic function in an organism, it may not be sufficient to delete a genomic copy of a single gene. In such cases it may be preferable to achieve a genetic knock-out with an anti-sense construct, particularly where the sequence is aligned with the coding portion of the mRNA.

[0102] Methods of transforming plant cells are well-known in the art, and include protoplast transformation, tungsten whiskers (Coffee et al., U.S. Pat. No. 5,302,523, issued Apr. 12, 1994), directly by microorganisms with infectious plasmids, use of transposons (U.S. Pat. No. 5,792,294), infectious viruses, the use of liposomes, microinjection by mechanical or laser beam methods, by whole chromosomes or chromosome fragments, electroporation, silicon carbide fibers, and microprojectile bombardment.

[0103] For example, one may utilize the biolistic bombardment of meristem tissue, at a very early stage of development, and the selective enhancement of transgenic sectors toward genetic homogeneity, in cell layers that contribute to germline transmission. Biolistics-mediated production of fertile, transgenic maize is described in Gordon-Kamm et aL (1990), Plant Cell 2:603; Fromm et a/. (1990) Bio/Technology 8: 833, for example. Alternatively, one may use a microorganism, including but not limited to, Agrobacterium tumefaciens as a vector for transforming the cells, particularly where the targeted plant is a dicotyledonous species. See, for example, U.S. Pat. No. 5,635,381. Leung et a/. (1990) Curr. Genet. 17(5):409-11 describe integrative transformation of three fertile hermaphroditic strains of Arabidopsis thaliana using plasmids and cosmids that contain an E. coli gene linked to Aspergillus nidulans regulatory sequences.

[0104] Preferred expression cassettes for cereals may include promoters that are known to express exogenous DNAs in corn cells. For example, the Adhl promoter has been shown to be strongly expressed in callus tissue, root tips, and developing kernels in corn. Promoters that are used to express genes in corn include, but are not limited to, a plant promoter such as the, CaMV 35S promoter (Odell et al., Nature, 313, 810 (1985)), or others such as CaMV 19S (Lawton et al., Plant Mol. Biol., 9, 31 F (1987)), nos (Ebert et al., PNAS USA, 84, 5745 (1987)), Adh (Walker et al., PNAS USA, 84, 6624 (1987)), sucrose synthase (Yang et al., PNAS USA, 87, 4144 (1990)), .alpha.-tubulin, ubiquitin, actin (Wang et al., Mol. Cell. Biol., 12, 3399 (1992)), cab (Sullivan et al., Mol. Gen. Genet, 215, 431 (1989)), PEPCase (Hudspeth et al., Plant Mol. Biol., 12, 579 (1989)), or those associated with the R gene complex (Chandler et al., The Plant Cell, 1, 1175 (1989)). Other promoters useful in the practice of the invention are known to those of skill in the art.

[0105] Tissue-specific promoters, including but not limited to, root-cell promoters ,::, z(Conkling et al., Plant Physiol., 93, 1203 (1990)), and tissue-specific enhancers (Fromm et al., The Plant Cell, 1, 977 (1989)) are also contemplated to be particularly useful, as are inducible promoters such as water-stress-, ABA- and turgor-inducible promoters (Guerrero et al., Plant Molecular Biology, 15,11-26)), and the like.

[0106] Regulating and/or limiting the expression in specific tissues may be functionally accomplished by introducing a constitutively expressed gene (all tissues) in combination with an antisense gene that is expressed only in those tissues where the gene product is not desired. Expression of an antisense transcript of this preselected DNA segment in an rice grain, using, for example, a zein promoter, would prevent accumulation of the gene product in seed. Hence the protein encoded by the preselected DNA would be present in all tissues except the kernel.

[0107] Alternatively, one may wish to obtain novel tissue-specific promoter sequences for use in accordance with the present invention. To achieve this, one may first isolate cDNA clones from the tissue concerned and identify those clones which are expressed specifically in that tissue, for example, using Northern blotting or DNA microarrays. Ideally, one would like to identify a gene that is not present in a high copy number, but which gene product is relatively abundant in specific tissues. The promoter and control elements of corresponding genomic clones may then be localized using the techniques of molecular biology known to those of skill in the art. Alternatively, promoter elements can be identified using enhancer traps based on T- DNA and/or transposon vector systems (see, for example, Campisi et aL (1999) Plant J. 17:699-707; Gu etaL. (1998) Development 125:1509-1517).

[0108] In some embodiments of the present invention expression of a DNA segment in a transgenic plant will occur only in a certain time period during the development of the plant. Developmental timing is frequently correlated with tissue specific gene expression. For example, in corn expression of zein storage proteins is initiated in the endosperm about 15 days after pollination.

[0109] Ultimately, the most desirable DNA segments for introduction into a plant genome may be homologous genes or gene families which encode a desired trait (e.g., increased disease resistance) and which are introduced under the control of novel promoters or enhancers, etc., or perhaps even homologous or tissue-specific (e.g., root-, grain- or leaf-specific) promoters or control elements.

[0110] The genetically modified cells are screened for the presence of the introduced genetic material. The cells may be used in functional studies, drug screening, etc., e.g. to study chemical mode of action, to determine the effect of a candidate agent on pathogen growth, infection of plant cells, etc.

[0111] The modified cells are useful in the study of genetic function and regulation, for alteration of the cellular metabolism, and for screening compounds that may affect the biological function of the gene or gene product. For example, a series of small deletions and/or substitutions may be made in the hosts native gene to determine the role of different domains and motifs in the biological function. Specific constructs of interest include anti-sense, as previously described, which will reduce or abolish expression, expression of dominant negative mutations, and over-expression of genes.

[0112] Where a sequence is introduced, the introduced sequence may be either a complete or partial sequence of a gene native to the host, or may be a complete or partial sequence that is exogenous to the host organism, e.g., an A. thaliana sequence inserted into wheat plants. A detectable marker, such as aldA, lac Z, etc. may be introduced into the locus of interest, where upregulation of expression will result in an easily detected change in phenotype.

[0113] One may also provide for expression of the gene or variants thereof in cells or tissues where it is not normally expressed, at levels not normally present in such cells or tissues, or at abnormal times of development, during sporulation, etc. By providing expression of the protein in cells in which it is not normally produced, one can induce changes in cell behavior.

[0114] DNA constructs for homologous recombination will comprise at least a portion of the provided gene or of a gene native to the species of the host organism, wherein the gene has the desired genetic modification(s), and includes regions of homology to the target locus (see Kempin et al. (1997) Nature 389:802-803). DNA constructs for random integration or episomal maintenance need not include regions of homology to mediate recombination. Conveniently, markers for positive and negative selection are included. Methods for generating cells having targeted gene modifications through homologous recombination are known in the art.

[0115] Embodiments of the invention provide processes for enhancing or inhibiting synthesis of a protein in a plant by introducing a provided nucleic acids sequence into a plant cell, where the nucleic acid comprises sequences encoding a protein of interest. For example, enhanced resistance to pathogens may be achieved by inserting a nucleic acid encoding an activator in a vector downstream from a promoter sequence capable of driving constitutive high-level expression in a plant cell. When grown into plants, the transgenic plants exhibit increased synthesis of resistance proteins, and increased resistance to pathogens.

[0116] Other embodiments of the invention provide processes for enhancing or inhibiting synthesis of a tolerance factor in a plant by introducing a nucleic acid of the invention into a plant cell, where the nucleic acid comprises sequences encoding a tolerance factor. For example, enhanced tolerance to an environmental stress may be achieved by inserting a nucleic acid encoding an activator in a vector downstream from a promoter sequence capable of driving constitutive high-level expression in a plant cell. When grown into plants, the transgenic plants exhibit increased synthesis of tolerance proteins, and increased tolerance to environmental stress.

[0117] Factors which are involved, directly or indirectly in biosynthetic pathways whose products are of commercial, nutritional, or medicinal value include any factor, usually a protein or peptide, which regulates such a biosynthetic pathway (e.g., an activator or repressor); which is an intermediate in such a biosynthetic pathway; or which is a product that increases the nutritional value of a food product; a medicinal product; or any product of commercial value and/or research interest. Plant and other cells may be genetically modified to enhance a trait of interest, by upregulating or down-regulating factors in a biosynthetic pathway.

### SCREENING ASSAYS

[0118] The polypeptides encoded by the provided nucleic acid sequences, and cells genetically altered to express such sequences, are useful in a variety of screening assays to determine effect of candidate inhibitors, activators., or modifiers of the gene product. One may determine what insecticides, fungicides and the like have an enhancing or synergistic activity with a gene. Alternatively, one may screen for compounds that mimic the activity of the protein. Similarly, the effect of activating agents may be used to screen for compounds that mimic or enhance the activation of proteins. Candidate inhibitors of a particular gene product are screened by detecting decreased from the targeted gene product.

[0119] The screening assays may use purified target macromolecules to screen large compound libraries for inhibitory drugs; or the purified target molecule may be used for a rational drug design program, which requires first determining the structure of the macromolecular target or the structure of the macromolecular target in association with its customary substrate or ligand. This information is then used to design compounds which must be synthesized and tested further. Test results are used to refine the molecular models and drug design process in an iterative fashion until a lead compound emerges.

[0120] Drug screening may be performed using an in vitro model, a genetically altered cell, or purified protein. One can identify ligands or substrates that bind to, modulate or mimic the action of the target genetic sequence or its product. A wide variety of assays may be used for this purpose, including labeled in vitro protein- protein binding assays, electrophoretic mobility shift assays, immunoassays for protein binding, and the like. The purified protein may also be used for determination of three-dimensional crystal structure, which can be used for modeling intermolecular interactions.

[0121] Where the nucleic acid encodes a factor involved in a biosynthetic pathway, as described above, it may be desirable to identify factors, e.g., protein factors, which interact with such factors. One can identify interacting factors, ligands, substrates that bind to, modulate or mimic the action of the target genetic sequence or its product. A wide variety of assays may be used for this purpose, including labeled in vitro protein-protein binding assays, electrophoretic mobility shift assays, immunoassays for protein binding, and the like. In vivo assays for protein-protein interactions in E. coli and yeast cells are also well-established (see Hu et al. (2000) Methods 20:80-94; and Bai and Elledge (1997) Methods Enzymol. 283:141-156).

[0122] The purified protein may also be used for determination of three-dimensional crystal structure, which can be used for modeling intermolecular interactions. It may also be of interest to identify agents that modulate the interaction of a factor identified as described above with a factor encoded by a nucleic acid of the invention. Drug screening can be performed to identify such agents. For example, a labeled in vitro protein-protein binding assay can be used, which is conducted in the presence and absence of an agent being tested.

[0123] The term “agent” as used herein describes any molecule, e.g. protein or pharmaceutical, with the capability of altering or mimicking a physiological function. Generally a plurality of assay mixtures are run in parallel with different agent concentrations to obtain a differential response to the various concentrations. Typically, one of these concentrations serves as a negative control, i.e. at zero concentration or below the level of detection.

[0124] Candidate agents encompass numerous chemical classes, though typically they are organic molecules, preferably small organic compounds having a molecular weight of more than 50 and less than about 2,500 daltons. Candidate agents comprise functional groups necessary for structural interaction with proteins, particularly hydrogen bonding, and typically include at least an amine, carbonyl, hydroxyl or carboxyl group, preferably at least two of the functional chemical groups. The candidate agents often comprise cyclical carbon or heterocyclic structures and/or aromatic or polyaromatic structures substituted with one or more of the above functional groups. Candidate agents are also found among biomolecules including peptides, saccharides, fatty acids, steroids, purines, pyrimidines, derivatives, structural analogs or combinations thereof.

[0125] Candidate agents are obtained from a wide variety of sources including libraries of synthetic or natural compounds. For example, numerous means are available for random and directed synthesis of a wide variety of organic compounds and biomolecules, including expression of randomized oligonucleotides and oligopeptides. Alternatively, libraries of natural compounds in the form of bacterial, fungal, plant and organism extracts are available or readily produced. Additionally, natural or synthetically produced libraries and compounds are readily modified through conventional chemical, physical and biochemical means, and may be used to produce combinatorial libraries. Known pharmacological agents may be subjected to directed or random chemical modifications, such as acylation, alkylation, esterification, amidification, etc. to produce structural analogs.

[0126] Where the screening assay is a binding assay, one or more of the molecules may be joined to a label, where the label can directly or indirectly provide a detectable signal. Various labels include radioisotopes, fluorescers, chemiluminescers, enzymes, specific binding molecules, particles, e.g. magnetic particles, and the like. Specific binding molecules include pairs, such as biotin and streptavidin, digoxin and antidigoxin etc. For the specific binding members, the complementary member would normally be labeled with a molecule that provides for detection, in accordance with known procedures.

[0127] A variety of other reagents may be included in the screening assay. These include reagents like salts, neutral proteins, e.g. albumin, detergents, etc that are used to facilitate optimal protein-protein binding and/or reduce non-specific or background interactions. Reagents that improve the efficiency of the assay, such as protease inhibitors, nuclease inhibitors, anti-microbial agents, etc. may be used. The mixture of components are added in any order that provides for the requisite binding. Incubations are performed at any suitable temperature, typically between 4 and 400 C. Incubation periods are selected for optimum activity, but may also be optimized to facilitate rapid high-throughput screening. Typically between 0.1 and 1 hours will be sufficient.

[0128] The compounds having the desired biological activity may be administered in an acceptable carrier to a host. The active agents may be administered in a variety of ways. Depending upon the manner of introduction, the compounds may be formulated in a variety of ways. The concentration of therapeutically active compound in the formulation may vary from about 0.01-100 wt. %.

[0129] It must be noted that as used herein and in the appended claims, the singular forms “a”, “and”, and “the” include plural referents unless the context clearly dictates otherwise. Thus, for example, reference to a complex includes a plurality of such complexes and reference to the formulation includes reference to one or more formulations and equivalents thereof known to those skilled in the art, and so forth.

[0130] Unless defined otherwise, all technical and scientific terms used herein have the same meaning as commonly understood to one of ordinary skill in the art to which this invention belongs. Although any methods, devices and materials similar or equivalent to those described herein can be used in the practice or testing of the invention, the preferred methods, devices and materials are now described.

[0131] All publications mentioned herein are incorporated herein by reference for the purpose of describing and disclosing, for example, the methods and methodologies that are described in the publications which might be used in connection with the presently described invention. The publications discussed above and throughout the text are provided solely for their disclosure prior to the filing date of the present application. Nothing herein is to be construed as an admission that the inventors are not entitled to antedate such disclosure by virtue of prior invention.

[0132] The following examples are put forth so as to provide those of ordinary skill in the art with a complete disclosure and description of how to make and use the subject invention, and are not intended to limit the scope of what is regarded as the invention. Efforts have been made to ensure accuracy with respect to the numbers used (e.g. amounts, temperature, concentrations, etc.) but some experimental errors and deviations should be allowed for. Unless otherwise indicated, parts are parts by weight, molecular weight is average molecular weight, temperature is in degrees Celsius, and pressure is at or near atmospheric.

### EXPERIMENTAL

[0133] Cloning and Characterization of Arabidopsis thaliana Genes.

[0134] Following DNA isolation, sequencing was performed using the Dye Primer Sequencing protocol, below. The sequencing reactions were loaded by hand onto a 48 lane ABI 377 and run on a 36 cm gel with the 36E-2400 run module and extraction. Gel analysis was performed with ABI software.

[0135] The Phred program was used to read the sequence trace from the ABI sequencer, call the bases and produce a sequence read and a quality score for each base call in the sequence., (Ewing et al. (1998) Genome Research 8:175-185; Ewing and Green (1998) Genome Research 8:186-194.) PolyPhred may be used to detect single nucleotide polymorphisms in sequences (Kwok et al. (1994) Genomics 25:615-622; Nickerson et al. (1997) Nucleic Acids Research 25(14):2745-2751.)

[0136] MicroWave Plasmid Protocol: Fill Beckman 96 deep-well growth blocks with 1 ml of TB containing 50 μg of ampicillin per ml. Inoculate each well with a colony picked with a toothpick or a 96-pin tool from a glycerol stock plate. Cover the blocks with a plastic lid and tape at two ends to hold lid in place. Incubate overnight (16-24 hours depending on the host stain) at 37° C. with shaking at 275 rpm in a New Brunswick platform shaker. Pellet cells by centrifugation for 20 minutes at 3250 rpm in a Beckman GS-R6K, decant TB and freeze pelleted cell in the 96 well block. Thaw blocks on the bench when ready to continue.

| | |
|---|---|
| For four blocks: | For 16 blocks: |
| 50 ml STET/TWEEN20 | 200 ml STET/TWEEN |
| 2 tubes RNAse (10 mg/ml, 600 ul ea) | 8 tubes RNAse |
| 1 tube lysozyme (25 mg) | 4 tubes lysozyme |

[0137] Pipette RNAse and Lysozyme into the corner of a beaker. Add Tween 20 solution and swirl to mix completely. Use the Multidrop (or Biohit) to add 25ul of sterile H₂O (from the L size autoclaved bottles) to each well. Resuspend the pellets by vortexing on setting 10 of the platform vortexer. Check pellets after 4 min. and repeat as necessary to resuspend completely. Use the multidrop to add 70 p1 of the freshly prepared MW-Tween 20 solution to each well. Vortex at setting 6 on the platform vortex for 15 seconds. Do not cause frothing.

[0138] Incubate the blocks at room temperature for 5 min. Place two blocks at a time in the microwave (1000 Watts) with the tape (placed on the H1 to H12 side of the block) facing away from each other and turn on at full power for 30 seconds. Rotate the blocks so that the tapes face towards each other and turn on at full power again for 30 seconds.

[0139] Immediately remove the blocks from the microwave and add 300 pl of sterile ice cold H₂O with the Multidrop. Seal the blocks with foil tape and place them in an H₂O/ice bath.

[0140] Vortex the blocks on 5 for 15 seconds and leave them in the H₂O/lce bath. Return to step 7 until all the blocks are in the ice water bath. Incubate the blocks for 15 minutes on ice. Spin the blocks for 30 minutes in the Beckman GS-6KR with GH3.8 rotor with Microplus carrier at 3250rpm.

[0141] Transfer 100 μl of the supernatant to Corning/Costar round bottom 96 well trays. Cover with foil and put into fridge if to be sequenced right away. If not to be sequenced in the next day, freeze them at −20° C.

[0142] Dye Primer Sequencing: Spin down the DP brew trays and DNA template by pulsing in the Beckman GS-6KR with GH3.8 rotor with Microplus carrier. Big Dye Primer reaction mix trays (one 96 well cycleplate (Robbins) for each nucleotide), 3 microliters of reaction mix per well.

[0143] Use twelve channel pipetter (Costar) to add 2 μl of template to one each G,A,T,C, trays for each template plate. Pulse again to get both the reaction mix and template into the bottom of the cycle plate and put them into the MJ Research DNA Tetrad (PTC-225).

[0144] Start program Dye-Primer. Dye-primer is:

[0145] 96° C., 1 min 1 cycle

[0146] 96° C., 10 sec.

[0147] 55° C., 5 sec.

[0148] 70° C., 1 min 15 cycles

[0149] 96° C., 10 sec.

[0150] 70° C., 1 min. 15 cycles

[0151] 4° C. soak

[0152] When done cycling, using the Robbins Hydra 290 add 100 μl of 100% ethanol to the A reaction cycle plate and pool the contents of all four cycle plates into the appropriate well.

[0153] To perform ethanol precipitation: Use Hydra program 4 to add 100 μl 100% ethanol to each A tray. Use Hydra program 5 to transfer the ethanol and therefore combine the samples from plate to plate. Once the G, A, T, and C trays of each block are mixed, spin for 30 minutes at 3250 in the Beckman. Pour off the ethanol with a firm shake and blot on a paper towel before drying in the speed vac (-10 minutes or until dry). If ready to load add 3 μl dye and denature in the oven at 95° C. for ˜5 minutes and load 2 μl. If to store, cover with tape and store at −20° C.

[0154] Common Solutions

[0155] Terrific Broth

[0156] Per liter:

[0157] 900 ml H₂O

[0158] 12 g bacto tryptone

[0159] 24 g bacto-yeast extract

[0160] 4 ml glycerol

[0161] Shake until dissolved and then autoclave. Allow the solution to cool to 60° C. or less and then add 100 ml of sterile 0.17M KH₂PO₄, 0.72M K₂HPO₄ (in the hood w/ sterile technique).

[0162] 0.17M KH₂PO₄, 0.72M K₂HPO₄

[0163] Dissolve 2.31 g of KH₂PO₄ and 12.54 g of K₂HPO₄ in 90 ml of H₂O.

[0164] Adjust volume to 100 ml with H₂O and autoclave.

[0165] Sequence loading Dye

[0166] 20 ml deionized formamide

[0167] 3.6 ml dH₂0

[0168] 400 μl 0.5M EDTA, pH 8.0

[0169] 0.2 g Blue Dextran

[0170] *Light sensitive, cover in foil or store in the dark.

[0171] STET/TWEEN

[0172] 10 ml 5M NaCl

[0173] 5 ml 1M Tris, pH 8.0

[0174] 1 ml 0.5M EDTA., pH 8.0

[0175] 25 ml Tween20

[0176] Bring volume to 500 ml with H₂O

[0177] The sequencing reactions are run on an ABI 377 sequencer per manufacturers instructions. The sequencing information obtained each run are analyzed as follows.

[0178] Sequencing reads are screened for ribosomal., mitochondrial., chloroplast or human sequence contamination.. In good sequences, vector is marked by x's. These sequences go into biolims regardless of whether or not they pass the criteria for a ‘good’ sequence. This criteria is >=100 bases with phred score of >=20 and 15 of these bases adjacent to each other.

[0179] Sequencing reads that pass the criteria for good sequences are downloaded for assembly into consensus sequences (contigs). The program Phrap (copyrighted by Phil Green at University of Washington, Seattle, Wash.) utilizes both the Phred sequence information and the quality calls to assemble the sequencing reads. Parameters used with Phrap were determined empirically to minimize assembly of chimeric sequences and maximize differential detection of closely related members of gene families. The following parameters were used with the Phrap program to perform the assembly:

| | | |
|---|---|---|
| Penalty | −6 | Penalty for mismatches(substitutions) |
| Minmatch | 40 | Minimum length of matching sequence to use in |
| | | assembly of reads |
| Trim penalty | 0 | penalty used for identifying degenerate sequence at |
| | | beginning and end of read. |
| Minscore | 80 | Minimum alignment score |

[0180] Results from the Phrap analysis yield either contigs consisting of a consensus of two or more overlapping sequence reads, or singlets that are non-overlapping .

[0181] The contig and singlets assembly were further analyzed to eliminate low quality sequence utilizing a program to filter sequences based on quality scores generated by the Phred program. The threshold quality for high quality base calls is 20. Sequences with less than 50 contiguous high quality bases calls at the beginning of the sequence, and also at the end of the sequence were discarded. Additionally, the maximum allowable percentage of “low quality base calls” in the final sequence is 2%, otherwise the sequence is discarded.

[0182] The stand-alone BLAST programs and Genbank databases were downloaded from NCBI for use on secure servers at the Paradigm Genetics, Inc. site. The sequences from the assembly were compared to the GenBank NR database downloaded from NCBI using the gapped version (2.0) of BLASTX. BLASTX translates the DNA sequence in all six reading frames and compares it to an amino acid database. Low complexity sequences are filtered in the query sequence. (Altschul et al. (1997) Nucleic Acids Res 25(17):3389-402).

[0183] Genbank sequences found in the BLASTX search with an E Value of less than 1el⁻¹⁰ are considered to be highly similar, and the Genbank definition lines were used to annotate the query sequences.

[0184] When no significantly similar sequences were found as a result of the BLASTX search, the query sequences were compared with the PROSITE database (Bairoch, 92) PROSITE: A dictionary of sites and patterns in proteins. Nucleic Acids Research 20:2013-2018. ) to locate functional motifs.

[0185] Query sequences were first translated in six reading frames using the Wisconsin GCG pepdata program (Wisconsin Package Version 10.0, Genetics Computer Group (GCG) , Madison, Wis., USA. ). The Wisconsin GCG motifs program (Wisconsin Package Version 10.0, Genetics Computer Group (GCG), Madison, Wisconsin, USA.) was used to locate motifs in the peptide sequence, with no mismatches allowed. Motif names from the PROSITE results were used to annotate these query sequences.

TABLE 1

| SEQ ID | Reference | Annotation |
|---|---|---|
| 1 | 2028001 | Tyr_Phospho_Site(512-519) |
| 2 | 2028002 | 1E-30 >gi\|4220454 (AC006216) Similar to gi\|3413714 T19L18.21 |
| | | myrosinase-binding protein from Arabidopsis thaliana BAC gb\|AC004747. ESTs |
| | | gb\|65870 and gb\|T20812 come from this gene. [Arabidopsis thaliana] Length = |
| | | 303 |
| 3 | 2028003 | 1E-133 >sp\|P43297\|RD21_ARATH CYSTEINE PROTEINASE RD21A |
| | | PRECURSOR >gi\|541857\|pir∥JN0719 drought-inducible cysteine proteinase (EC |
| | | 3.4.22.-) RD21A precursor - Arabidopsis thaliana >gi\|435619\|dbj\|BAA02374\| |
| | | (D13043) thiol protease [Arabidopsis thaliana] Length = 462 |
| 4 | 2028004 | 5E-60 >gb\|AAD56998.1\|AC009465_12 (AC009465) mitogen activated protein |
| | | kinase kinase [Arabidopsis thaliana] Length = 700 |
| 5 | 2028005 | 1E-28 >gb\|AAD36643.1\|AE001802_12 (AE001802) hemolysin [Thermotoga |
| | | maritima] Length = 267 |
| 6 | 2028006 | 4E-41 >emb\|CAA72903\| (Y12227) topoisomerase [Arabidopsis thaliana] |
| | | Length = 618 |
| 7 | 2028007 | 1E-103 >emb\|CAB36783.1\| (AL035525) aminopeptidase-like protein |
| | | [Arabidopsis thaliana] Length = 873 |
| 8 | 2028008 | 2E-26 >sp\|P46810\|GUAA_MYCLE GMP SYNTHASE [GLUTAMINE- |
| | | HYDROLYZING] (GLUTAMINE AMIDOTRANSFERASE) (GMP SYNTHETASE) |
| | | >gi\|2145847\|pir∥S72813 GMP synthase (glutamine-hydrolysing) (EC 6.3.5.2) |
| | | guaA - Mycobacterium leprae >gi\|466934 (U00015) guaA; B1620_C2_205 |
| | | [Mycobacterium leprae] Length = 590 |
| 9 | 2028009 | Tyr_Phospho_Site(706-713) |
| 10 | 2028010 | 2E-33 >gb\|AAD42941.1\|AF091621_1 (AF091621) ubiquitin-conjugating enzyme |
| | | E2 [Catharanthus roseus] Length = 153 |
| 11 | 2028011 | 1E-14 >gi\|2829899 (AC002311) similar to ripening-induced protein, |
| | | gp\|AJ001449\|2465015 and major#latex protein, gp\|X91961\|1107495 [Arabidopsis |
| | | thaliana] Length = 160 |
| 12 | 2028012 | Tyr_Phospho_Site(900-908) |
| 13 | 2028013 | 2E-37 >emb\|CAB52246.1\| (AJ245478) alpha galactosyltransferase |
| | | [Trigonella foenum-graecum] Length = 438 |
| 14 | 2028014 | Tyr_Phospho_Site(181-187) |
| 15 | 2028015 | Rgd(201-203) |
| 16 | 2028016 | 3E-70 >sp\|Q08770\|RL10_ARATH 60S RIBOSOMAL PROTEIN L10 (WILM'S |
| | | TUMOR SUPPRESSOR PROTEIN HOMOLOG) >gi\|478401\|pir∥JQ2244 |
| | | ribosomal protein L10.e, cytosolic - Arabidopsis thaliana |
| | | >gi\|17682\|emb\|CAA78856\| (Z15157) Wilm's tumor suppressor homologue |
| | | [Arabidopsis thaliana] Length = 220 |
| 17 | 2028017 | 1E-80 >gi\|2924779 (AC002334) 3-ketoacyl-CoA thiolase [Arabidopsis |
| | | thaliana] >gi\|2981616\|dbj\|BAA25248\| (AB008854) 3-ketoacyl-CoA thiolase |
| | | [Arabidopsis thaliana] >gi\|2981618\|dbj\|BAA25249\| (AB008855) 3-ketoacyl-CoA |
| | | thiolase [Arabidopsis thaliana] Length = 462 |
| 18 | 2028018 | 3′ Tyr_Phospho_Site(224-232) |
| 19 | 2028019 | 3′ Pkc_Phospho_Site(35-37) |
| 20 | 2028020 | 5′ Pkc_Phospho_Site(86-88) |
| 21 | 2028021 | 5′ 3E-21 >gi\|3123745\|dbj\|BAA25999\| (AB013447) aluminum-induced |
| | | [Brassica napus] Length = 244 |
| 22 | 2028022 | 5′ Tyr_Phospho_Site(211-218) |
| 23 | 2028023 | 5′ 3E-32 >gi\|461812\|sp\|Q05047\|CP72_CATRO CYTOCHROME P450 72A1 |
| | | (CYPLXXII) (PROBABLE GERANIOL-10-HYDROXYLASE) (GE10H) >gi\|167484 |
| | | (L10081) Cytochrome P-450 protein [Catharanthus roseus] |
| | | >gi\|445604\|prf∥1909351A cytochrome P450 [Catharanthus roseus] Length = 524 |
| 24 | 2028024 | 5′ Tyr_Phospho_Site(825-833) |
| 25 | 2028025 | 5′ 2E-75 >gi\|4006827\|gb\|AAC95169.1\| (AC005970) subtilisin-like protease |
| | | [Arabidopsis thaliana] Length = 754 |
| 26 | 2028026 | 5E-40 >gi\|135915\|sp\|P28493\|PR5_ARATH PATHOGENESIS-RELATED |
| | | PROTEIN 5 PRECURSOR (PR-5) >gi\|322559\|pir∥JQ1695 pathogenesis-related |
| | | protein 5 precursor - Arabidopsis thaliana >gi\|166865 (M90510) thaumatin-like |
| | | protein [Arabidopsis thaliana] >gi\|1448919 (L78079) thaumatin-like protein |
| | | [Arabidop |
| 27 | 2028027 | 8E-24 >gb\|AAD15390\| (AC006223) sugar starvation-induced protein |
| | | [Arabidopsis thaliana] Length = 256 |
| 28 | 2028028 | 9E-34 >sp\|Q39230\|SYS_ARATH SERYL-TRNA SYNTHETASE (SERINE- |
| | | TRNA LIGASE) (SERRS) >gi\|2129737\|pir∥S71293 seryl-tRNA synthetase - |
| | | Arabidopsis thaliana >gi\|1359497\|emb\|CAA94388\| (Z70313) seryl-tRNA |
| | | Synthetase [Arabidopsis thaliana] Length = 451 |
| 29 | 2028029 | 4E-57 >sp\|P21528\|MDHC_PEA MALATE DEHYDROGENASE [NADP] , |
| | | CHLOROPLAST PRECURSOR (NADP-MDH) >gi\|481222\|pir∥S38346 malate |
| | | dehydrogenase (NADP+) (EC 1.1.1.82) - garden pea >gi\|397475\|emb\|CAA52614\| |
| | | (X74507) malate dehydrogenase (NADP+) [Pisum sativum] Length = 441 |
| 30 | 2028030 | Rgd(1079-1081) |
| 31 | 2028031 | Tyr_Phospho_Site(722-728) |
| 32 | 2028032 | 3E-23 >emb\|CAB10154\| (Z97211) probable involvement in ergosterol |
| | | synthesis [Schizosaccharomyces pombe] Length = 1213 |
| 33 | 2028033 | 1E-102 >dbj\|BAA28531\| (D78598) cytochrome P450 monooxygenase |
| | | [Arabidopsis thaliana] >gi\|5262761\|emb\|CAB45909.1\| (AL080283) cytochrome |
| | | P450 monooxygenase [Arabidopsis thaliana] Length = 499 |
| 34 | 2028034 | 5E-36 >sp\|Q42885\|ARC2_LYCES CHORISMATE SYNTHASE 2 |
| | | PRECURSOR (5-ENOLPYRUVYLSHIKIMATE-3-PHOSPHATE |
| | | PHOSPHOLYASE 2) >gi\|542027\|pir∥S40409 chorismate synthase (EC 4.6.1.4) 2 |
| | | precursor - tomato >gi\|410484\|emb\|CAA79854\| (Z21791) chorismate synthase 2 |
| | | [Lycopersicon esculentum] Length = 431 |
| 35 | 2028035 | Tyr_Phospho_Site(19-25) |
| 36 | 2028036 | 1E-123 >emb\|CAA19688.1\| (AL024486) aspartate kinase-homoserine |
| | | dehydrogenase-like protein [Arabidopsis thaliana] Length = 916 |
| 37 | 2028037 | 2E-23 >gb\|AAD48585.1\| (AF110645) candidate tumor suppressor p33 |
| | | ING1 homolog [Homo sapiens] Length = 249 |
| 38 | 2028038 | Tyr_Phospho_Site(939-945) |
| 39 | 2028039 | 1E-49 >gi\|1619956 (U72151) voltage-gated chloride channel |
| | | [Arabidopsis thaliana] Length = 773 |
| 40 | 2028040 | 1E-22 >gi\|2338712 (AF013959) metallothionein-like protein [Arabidopsis |
| | | thaliana] Length = 69 |
| 41 | 2028041 | Pkc_Phospho_Site(45-47) |
| 42 | 2028042 | 5E-49 >sp\|Q05047\|CP72_CATRO CYTOCHROME P450 72A1 (CYPLXXII) |
| | | (PROBABLE GERANIOL-10-HYDROXYLASE) (GE10H) >gi\|167484 (L10081) |
| | | Cytochrome P-450 protein [Catharanthus roseus] >gi\|445604\|prf∥1909351A |
| | | cytochrome P450 [Catharanthus roseus] Length = 524 |
| 43 | 2028043 | Pkc_Phospho_Site(62-64) |
| 44 | 2028044 | 3′ 1E-34 >gi\|6016708\|gb\|AAF01534.1\|AC009325_4 (AC009325) protein |
| | | kinase [Arabidopsis thaliana] Length = 411 |
| 45 | 2028045 | 3′ Tyr_Phospho_Site(46-53) |
| 46 | 2028046 | 3′ Tyr_Phospho_Site(297-304) |
| 47 | 2028047 | 3′ Tyr_Phospho_Site(675-683) |
| 48 | 2028048 | 3′ Tyr_Phospho_Site(77-84) |
| 49 | 2028049 | 3′ Tyr_Phospho_Site(734-740) |
| 50 | 2028050 | 5′ 3E-76 >gi\|2864613\|emb\|CAA16960\| (AL021811) S-receptor kinase -like |
| | | protein [Arabidopsis thaliana] >gi\|4049333\|emb\|CAA22558.1\|(AL034567) S- |
| | | receptor kinase-like protein [Arabidopsis thaliana] Length = 778 |
| 51 | 2028051 | 5′ 3E-48 >gi\|1514643\|emb\|CAA94437\| (Z70524) PDR5-like ABC transporter |
| | | [Spirodela polyrrhiza] Length = 1441 |
| 52 | 2028052 | Pkc_Phospho_Site(18-20) |
| 53 | 2028053 | 7E-30 >sp\|O07051\|LTAA_AERJA L-ALLO-THREONINE ALDOLASE (L- |
| | | ALLO-TA) (L-ALLO-THREONINE ACETALDEHYDE-LYASE) |
| | | >gi\|2190272\|dbj\|BAA20404\| (D87890) L-allo-threonine aldolase [Aeromonas |
| | | jandaei] Length = 338 |
| 54 | 2028054 | 8E-68 >gb\|AAD46410.1\|AF096260_1 (AF096260) ER66 protein [Lycopersicon |
| | | esculentum] Length = 558 |
| 55 | 2028055 | 9E-60 >dbj\|BAA74589\| (AB021934) nicotianamine synthase [Arabidopsis |
| | | thaliana] Length = 320 |
| 56 | 2028056 | 3E-67 >gi\|2281645 (AF003103) AP2 domain containing protein |
| | | RAP2.10 [Arabidopsis thaliana] >gi\|2632063\|emb\|CAA05630.1\| (AJ002598) |
| | | TINY-like protein [Arabidopsis thaliana] Length = 259 |
| 57 | 2028057 | Tyr_Phospho_Site(473-481) |
| 58 | 2028058 | Tyr_Phospho_Site(216-223) |
| 59 | 2028059 | 4E-59 >sp\|P34881\|MTDM_ARATH DNA (CYTOSINE-5)- |
| | | METHYLTRANSFERASE (DNA METHYLTRANSFERASE) (DNA METASE) |
| | | >gi\|1363480\|pir∥S59604 DNA (cytosine-5-)-methyltransferase (EC 2.1.1.37) - |
| | | Arabidopsis thaliana >gi\|304107 (L10692) cytosine-5 methyltransferase |
| | | [Arabidopsis thaliana] Length = 1534 |
| 60 | 2028060 | Tyr_Phospho_Site(426-434) |
| 61 | 2028061 | 3′ Pkc_Phospho_Site(147-149) |
| 62 | 2028062 | 3′ 7E-28 >gi\|1702872\|emb\|CAA70862\| (Y09667) ferredoxin-dependent |
| | | glutamate synthase [Arabidopsis thaliana] Length = 1648 |
| 63 | 2028063 | 3′ Pkc_Phospho_Site(4-6) |
| 64 | 2028064 | 3′ 2E-81 >gi\|4006882\|emb\|CAB16800.1\| (Z99707) UDP- |
| | | glucuronyltransferase-like protein [Arabidopsis thaliana] Length = 544 |
| 65 | 2028065 | 3′ Pkc_Phospho_Site(48-50) |
| 66 | 2028066 | 5′ Tyr_Phospho_Site(696-704) |
| 67 | 2028067 | 5′ 3E-76 >gi\|3738320 (AC005170) cinnamoyl CoA reductase |
| | | [Arabidopsis thaliana] Length = 303 |
| 68 | 2028068 | 5′ Rgd(11-13) |
| 69 | 2028069 | 5′ 3E-74 >gi\|134103\|sp\|P21240\|RUBB_ARATH RUBISCO SUBUNIT |
| | | BINDING-PROTEIN BETA SUBUNIT PRECURSOR (60 KD CHAPERONIN |
| | | BETA SUBUNIT) (CPN-60 BETA) Length = 600 |
| 70 | 2028070 | 5′ Tyr_Phospho_Site(407-414) |
| 71 | 2028071 | 5′ 2E-15 >gi\|3157926 (AC002131) Strong similarity to extensin-like |
| | | protein gb\|Z34465 from Zea mays. [Arabidopsis thaliana] Length = 744 |
| 72 | 2028072 | Tyr_Phospho_Site(809-817) |
| 73 | 2028073 | Pkc_Phospho_Site(15-17) |
| 74 | 2028074 | Pkc_Phospho_Site(13-15) |
| 75 | 2028075 | 3E-14 >gb\|AAD27733.1\|AF132958_1 (AF132958) CGI-24 protein [Homo |
| | | sapiens] Length = 241 |
| 76 | 2028076 | Tyr_Phospho_Site(71-79) |
| 77 | 2028077 | 3E-41 >emb\|CAB10236.1\| (Z97336) acylaminoacyl-peptidase like protein |
| | | [Arabidopsis thaliana] Length = 426 |
| 78 | 2028078 | Pkc_Phospho_Site(66-68) |
| 79 | 2028079 | 7E-22 >ref\|NP_009045.1\|PTMF1\| TATA element modulatory factor 1 |
| | | >gi\|423112\|pir∥A47212 transcription factor TMF, TATA element modulatory factor |
| | | - human >gi\|5870866\|gb\|AAD54608.1\| (L01042) TATA element modulatory factor |
| | | [Homo sapi |
| 80 | 2028080 | 6E-24 >dbj\|BAA25989\| (D89051) ERD6 protein [Arabidopsis thaliana] |
| | | Length = 496 |
| 81 | 2028081 | Pkc_Phospho_Site(34-36) |
| 82 | 2028082 | Pkc_Phospho_Site(246-248) |
| 83 | 2028083 | 1E-16 >gi\|3883120 (AF082298) arabinogalactan-protein [Arabidopsis |
| | | thaliana] Length = 131 |
| 84 | 2028084 | 1E-32 >gb\|AAD26203.1\|AF117267_1 (AF117267) UDP glucose:flavonoid 3-O- |
| | | glucosyl transferase [Malus domestica] Length = 483 |
| 85 | 2028085 | Tyr_Phospho_Site(497-504) |
| 86 | 2028086 | Pkc_Phospho_Site(393-395) |
| 87 | 2028087 | 3′ 8E-25 >gi\|4093155 (AF088281) phytochrome-associated protein 1 |
| | | [Arabidopsis thaliana] Length = 267 |
| 88 | 2028088 | 3′ Pkc_Phospho_Site(18-20) |
| 89 | 2028089 | 3′ 1E-40 >gi\|4006860\|emb\|CAB16778.1\| (Z99707) thiol-disulfide interchange |
| | | like protein [Arabidopsis thaliana] Length = 261 |
| 90 | 2028090 | 3′ 5E-12 >gi\|6225409\|sp\|O27955\|GATA_ARCFU PROBABLE GLUTAMYL- |
| | | TRNA(GLN) AMIDOTRANSFERASE SUBUNIT A (GLU-ADT SUBUNIT A) |
| | | >gi\|2648182 (AE000943) Glu-tRNA amidotransferase, subunit A (gatA-2) |
| | | [Archaeoglobus fulgidus] Length = 457 |
| 91 | 2028091 | 3′ 7E-57 >gi\|4510424\|gb\|AAD21510.1\| (AC006929) carboxypeptidase |
| | | [Arabidopsis thaliana] Length = 361 |
| 92 | 2028092 | 3′ Pkc_Phospho_Site(127-129) |
| 93 | 2028093 | 5′ 2E-70 >gi\|1169598\|sp\|P46313\|FD6E_ARATH OMEGA-6 FATTY ACID |
| | | DESATURASE, ENDOPLASMIC RETICULUM (DELTA-12 DESATURASE) |
| | | >gi\|438451 (L26296) delta-12 desaturase [Arabidopsis thaliana] Length = 383 |
| 94 | 2028094 | 5′ Pkc_Phospho_Site(30-32) |
| 95 | 2028095 | 5′ Tyr_Phospho_Site(94-101) |
| 96 | 2028096 | 5′ Tyr_Phospho_Site(479-486) |
| 97 | 2028097 | 5′ 3E-17 >gi\|6174930\|sp\|Q13200\|PSD2_HUMAN 26S PROTEASOME |
| | | REGULATORY SUBUNIT S2 (P97) (TUMOR NECROSIS FACTOR TYPE 1 |
| | | RECEPTOR ASSOCIATED PROTEIN 2) (55.11 PROTEIN) Length = 908 |
| 98 | 2028098 | 5′ Tyr_Phospho_Site(102-109) |
| 99 | 2028099 | 5′ 2E-28 >gi\|2735764 (AF008651) MADS transcriptional factor; |
| | | STMADS16 [Solanum tuberosum] Length = 234 |
| 100 | 2028100 | 5E-28 >gb\|AAD43611.1\|AC005698_10 (AC005698) T3P18.10 [Arabidopsis |
| | | thaliana] Length = 482 |
| 101 | 2028101 | Tyr_Phospho_Site(611-618) |
| 102 | 2028102 | 9E-34 >gi\|3687235 (AC005169) copia-like transposable element |
| | | [Arabidopsis thaliana] Length = 213 |
| 103 | 2028103 | 3E-80 >emb\|CAA76178.1\| (Y16327) cyclic nucleotide-regulated ion |
| | | channel [Arabidopsis thaliana] Length = 716 |
| 104 | 2028104 | Tyr_Phospho_Site(1098-1104) |
| 105 | 2028105 | Tyr_Phospho_Site(164-172) |
| 106 | 2028106 | Pkc_Phospho_Site(15-17) |
| 107 | 2028107 | 1E-126 >emb\|CAA17550\| (AL021961) receptor protein kinase - like |
| | | protein [Arabidopsis thaliana] Length = 980 |
| 108 | 2028108 | 1E-51 >dbj\|BAA77337.1\| (AB019533) Nad-dependent formate |
| | | dehydrogenase [Oryza sativa] Length = 376 |
| 109 | 2028109 | 2E-34 >emb\|CAB16828.1\| (Z99708) splicing factor-like protein [Arabidopsis |
| | | thaliana] Length = 573 |
| 110 | 2028110 | Tyr_Phospho_Site(69-76) |
| 111 | 2028111 | 7E-54 >sp\|Q96533\|ADH3_ARATH GLUTATHIONE-DEPENDENT |
| | | FORMALDEHYDE DEHYDROGENASE (FDH) (FALDH) (GSH-FDH) |
| | | >gi\|1498024 (U63931) glutathione-dependent formaldehyde dehydrogenase |
| | | [Arabidopsis thaliana] Length = 379 |
| 112 | 2028112 | 2E-77 ) >emb\|CAB10698\| (Z97558) argininosuccinate lyase [Arabidopsis |
| | | thaliana] Length = 517 |
| 113 | 2028113 | Tyr_Phospho_Site(375-382) |
| 114 | 2028114 | 3E-29 >pir∥A42150 P-glycoprotein atpgp1 - Arabidopsis thaliana |
| | | >gi\|3849833\|emb\|CAA43646\| (X61370) P-glycoprotein [Arabidopsis thaliana] |
| | | >gi\|4883607\|gb\|AAD31576.1\|AC006922_8 (AC006922) P-glycoprotein pgp1 |
| | | [Arabidopsis thaliana] Length = 1286 |
| 115 | 2028115 | 5E-46 >emb\|CAB56614.1\| (AJ234901) acetolactate synthase small subunit |
| | | [Nicotiana plumbaginifolia] Length = 449 |
| 116 | 2028116 | 3′ Pkc_Phospho_Site(24-26) |
| 117 | 2028117 | 3′ 2E-18 >gi\|3249071 (AC004473) Contains similarity to protein |
| | | tyrosine phosphatase 2 gb\|L15420 from Dictyostelium discoideum. EST |
| | | gb\|N38718 comes from this g [Arabidopsis thaliana] Length = 547 |
| 118 | 2028118 | 3′ Tyr_Phospho_Site(25-33) |
| 119 | 2028119 | 3′ 1E-26 >gi\|4531441\|gb\|AAD22126.1\|AC006224_8 (AC006224) |
| | | pectinesterase [Arabidopsis thaliana] Length = 518 |
| 120 | 2028120 | 3′ Pkc_Phospho_Site(61-63) |
| 121 | 2028121 | 5′ Tyr_Phospho_Site 26-34 |
| 122 | 2028122 | 5′ 2E-36 >gi\|3021279\|emb\|CAA18474.1\| (AL022347) serine/threonine kinase |
| | | [Arabidopsis thaliana] Length = 581 |
| 123 | 2028123 | 5′ 1E-41 >gi\|5454072\|ref\|NP_006416.1\|pSLU7\|step II splicing factor SLU7 |
| | | >gi\|4249705\|gb\|AAD13774.1\| (AF101074) step II splicing factor SLU7 [Homo |
| | | sapiens] Length = 586 |
| 124 | 2028124 | 5′ Tyr_Phospho_Site(469-477) |
| 125 | 2028125 | 5′ Pkc_Phospho_Site(103-105) |
| 126 | 2028126 | 1E-69 >emb\|CAA17559\| (AL021961) glucosyltransferase -like protein |
| | | [Arabidopsis thaliana] Length = 478 |
| 127 | 2028127 | Pkc_Phospho_Site(1-3) |
| 128 | 2028128 | Tyr_Phospho_Site(959-965) |
| 129 | 2028129 | 1E-50 >gi\|1432083 (U60981) homolog to Skp1p, an evolutionarily |
| | | conserved kinetochore protein in budding yeast [Arabidopsis thaliana] |
| | | >gi\|3068807 (AF059294) Skp1 homolog [Arabidopsis thaliana] >gi\|3719209 |
| | | (U97020) UIP1 [Arabidopsis thaliana] Length = 160 |
| 130 | 2028130 | Pkc_Phospho_Site(42-44) |
| 131 | 2028131 | 3E-30 >gi\|1732515 (U62744) myosin heavy chain-like protein |
| | | [Arabidopsis thaliana] Length = 209 |
| 132 | 2028132 | 2E-77 >dbj\|BAA76297.1\| (AB013912) DNA helicase [Mus musculus] |
| | | Length = 463 |
| 133 | 2028133 | 1E-118 >sp\|P32826\|CBPX_ARATH SERINE CARBOXYPEPTIDASE |
| | | PRECURSOR >gi\|166674 (M81130) carboxypeptidase Y-like protein [Arabidopsis |
| | | thaliana] >gi\|445120\|prf∥908426A carboxypeptidase Y [Arabidopsis thaliana] |
| | | Length = 539 |
| 134 | 2028134 | Pkc_Phospho_Site(67-69) |
| 135 | 2028135 | Pkc_Phospho_Site(1-3) |
| 136 | 2028136 | 7E-74 >pir∥S37495 peroxidase (EC 1.11.1.7) - Arabidopsis thaliana |
| | | >gi\|405611\|emb\|CAA50677\| (X71794) peroxidase [Arabidopsis thaliana] Length = |
| | | 353 |
| 137 | 2028137 | 1E-17 >gi\|497174 (U07631) beta-hexosaminidase [Mus musculus] |
| | | >gi\|497196 (U07721) beta-hexosaminidase alpha-subunit [Mus musculus] Length |
| | | = 528 |
| 138 | 2028138 | Tyr_Phospho_Site(722-729) |
| 139 | 2028139 | 2E-36 >gb\|AAD1445616\| (AC005275) component of cytochrome B6-F |
| | | complex [Arabidopsis thaliana] >gi\|5725450\|emb\|CAB52433.1\| (AJ243702) rieske |
| | | iron-sulfur protein precursor [Arabidopsis thaliana] Length = 229 |
| 140 | 2028140 | Pkc_Phospho_Site(23-25) |
| 141 | 2028141 | Tyr_Phospho_Site(57-64) |
| 142 | 2028142 | 3′ 2E-32 >gi\|2499498\|sp\|Q42962\|PGKY_TOBAC PHOSPHOGLYCERATE |
| | | KINASE, CYTOSOLIC >gi\|1161602\|emb\|CAA88840\| (Z48976) phosphoglycerate |
| | | kinase (PGK) [Nicotiana tabacum] Length = 401 |
| 143 | 2028143 | 3′ 5E-15 >gi\|3184098\|emb\|CAA19311.1\| (AL023777) coenzyme a synthetase |
| | | [Schizosaccharomyces pombe] Length = 512 |
| 144 | 2028144 | 3′ Pkc_Phospho_Site(62-64) |
| 145 | 2028145 | 5′ Pkc_Phospho_Site(26-28) |
| 146 | 2028146 | 5′ 3E-80 >gi\|3415115 (AF081202) villin 2 [Arabidopsis thaliana] |
| | | Length = 976 |
| 147 | 2028147 | 5′ Tyr_Phospho_Site(658-666) |
| 148 | 2028148 | 5′ Tyr_Phospho_Site(700-707) |
| 149 | 2028149 | 1E-32 >gi\|3193316 (AF069299) contains similarity to nucleotide sugar |
| | | epimerases [Arabidopsis thaliana] Length = 430 |
| 150 | 2028150 | Tyr_Phospho_Site(304-310) |
| 151 | 2028151 | Tyr_Phospho_Site(764-772) |
| 152 | 2028152 | 3E-44 >gb\|AAD27568.1\|AF114171_9 (AF114171) H beta 58 homolog [Sorghum |
| | | bicolor] Length = 616 |
| 153 | 2028153 | 8E-65 >gi\|3249095 (AC003114) Contains similarity to dihydrofolate |
| | | reductase (dfr1) gb\|L13703 from Schizosaccharomyces pombe. ESTs gb\|N37567 |
| | | and gb\|T43002 come from this gene. [Arabidopsis thaliana] Length = 550 |
| 154 | 2028154 | 2E-78 >gi\|2281085 (AC002333) CTR1 protein kinase isolog |
| | | [Arabidopsis thaliana] Length = 282 |
| 155 | 2028155 | 2E-84 >emb\|CAB43938.1\| (AJ006349) endo-beta-1,4-glucanase [Fragaria |
| | | x ananassa] Length = 620 |
| 156 | 2028156 | Tyr_Phospho_Site(253-260) |
| 157 | 2028157 | Rgd(302-304) |
| 158 | 2028158 | Tyr_Phospho_Site(762-769) |
| 159 | 2028159 | 8E-87 >gb\|AAD21729.1\| (AC006931) citrate synthase [Arabidopsis |
| | | thaliana] Length = 509 |
| 160 | 2028160 | Tyr_Phospho_Site(64-72) |
| 161 | 2028161 | 3E-89 >sp\|P42749\|UBC5_ARATH UBIQUITIN-CONJUGATING ENZYME E2- |
| | | 21 KD 2 (UBIQUITIN-PROTEIN LIGASE 5) (UBIQUITIN CARRIER PROTEIN 5) |
| | | Length = 185 |
| 162 | 2028162 | 8E-91 >emb\|CAA18628.1\| (AL022580) pectinacetylesterase protein |
| | | [Arabidopsis thaliana] Length = 362 |
| 163 | 2028163 | Receptor_Cytokines_1(74-87) |
| 164 | 2028164 | 3′ 6E-38 >gi\|3193301 (AF069298) Arabidopsis chloroplast outer |
| | | envelope 86-like protein T10P11.19 (GB: AC002330) [Arabidopsis thaliana] |
| | | Length = 1503 |
| 165 | 2028165 | 3′ Rgd(776-778) |
| 166 | 2028166 | 3′ 2E-13 >gi\|4337011\|gb\|AAD18035.1\| (AF119572) zinc-binding peroxisomal |
| | | integral membrane protein [Arabidopsis thaliana] Length = 381 |
| 167 | 2028167 | 5′ Tyr_Phospho_Site(568-575) |
| 168 | 2028168 | 5′ Pkc_Phospho_Site(100-102) |
| 169 | 2028169 | Pkc_Phospho_Site(15-17) |
| 170 | 2028170 | 4E-19 >gb\|AA022663.1\|AC006555_1 (AC006555) beta-1,3-glucanase |
| | | [Arabidopsis thaliana] >gi\|4662638\|gb\|AAD26909.1\|AC007233_1 (AC007233) |
| | | beta-1,3-glucanase [Arabidopsis thaliana] Length = 473 |
| 171 | 2028171 | 4E-86 >pir∥S44261 SRG1 protein - Arabidopsis thaliana |
| | | >gi\|479047\|emb\|CAA55654\| (X79052) SRG1 [Arabidopsis thaliana] |
| | | >gi\|5734767\|gb\|AAD50032.1\|AC007651_27 (AC007651) SRG1 Protein |
| | | [Arabidopsis thaliana] Length = 358 |
| 172 | 2028172 | 1E-29 >gb\|AAD22656.1\|AC007138_20 (AC007138) NifU-like metallocluster |
| | | assembly factor [Arabidopsis thaliana] Length = 174 |
| 173 | 2028173 | 1E-91 >gi\|2062158 (AC001645) jasmonate inducible protein isolog |
| | | [Arabidopsis thaliana] Length = 300 |
| 174 | 2028174 | 1E-101 >gb\|AAF00639.1\|AC009540_16 (AC009540) methionine synthase |
| | | [Arabidopsis thaliana] Length = 765 |
| 175 | 2028175 | 2E-55 >sp\|O64765\|UAP1_ARATH PROBABLE UDP-N- |
| | | ACETYLGLUCOSAMINE PYROPHOSPHORYLASE >gi\|3033397 (AC004238) |
| | | unknown protein [Arabidopsis thaliana] Length = 502 |
| 176 | 2028176 | 2E-20 >gi\|1762933 (U66263) tumor-related protein [Nicotiana tabacum] |
| | | Length = 210 |
| 177 | 2028177 | 2E-33 >gb\|AAD24645.1\|AC006220_1 (AC006220) symbiosis-related protein |
| | | [Arabidopsis thaliana] Length = 120 |
| 178 | 2028178 | Tyr_Phospho_Site(600-606) |
| 179 | 2028179 | 8E-18 >gi\|1840425 (U36586) alcohol dehydrogenase [Vitis vinifera] |
| | | Length = 380 |
| 180 | 2028180 | Tyr_Phospho_Site(339-345) |
| 181 | 2028181 | 3′ Tyr_Phospho_Site(368-375) |
| 182 | 2028182 | 5′ 4E-68 >gi\|3914002\|sp\|O64948\|LON1_ARATH MITOCHONDRIAL LON |
| | | PROTEASE HOMOLOG 1 PRECURSOR >gi\|2935279 (AF033862) Lon protease |
| | | [Arabidopsis thaliana] Length = 888 |
| 183 | 2028183 | 5′ Pkc_Phospho_Site(43-45) |
| 184 | 2028184 | 5′ 7E-51 >gi\|3859659\|emb\|CAA20566.1\| (AL031394) potassium transporter |
| | | AtKT5p (AtKT5) [Arabidopsis thaliana] Length = 846 |
| 185 | 2028185 | 5′ Pkc_Phospho_Site(60-62) |
| 186 | 2028186 | 5′ Rgd(273-275) |
| 187 | 2028187 | Pkc_Phospho_Site(30-32) |
| 188 | 2028188 | Pkc_Phospho_Site(57-59) |
| 189 | 2028189 | 4E-32 >gi\|2275196 (AC002337) water stress-induced protein, WSI76 |
| | | isolog [Arabidopsis thaliana] >gi\|4630746\|gb\|AAD26596.1\|AC007236_1 |
| | | (AC007236) water stress-induced protein [Arabidopsis thaliana] Length = 344 |
| 190 | 2028190 | 2E-14 >gi\|2342666 (AF014502) seed coat peroxidase precursor |
| | | [Glycine max] Length = 352 |
| 191 | 2028191 | Tyr_Phospho_Site(150-156) |
| 192 | 2028192 | 6E-41 >sp\|P25865\|UBC1_ARATH UBIQUITIN-CONJUGATING ENZYME E2- |
| | | 17 KD 1 (UBIQUITIN-PROTEIN LIGASE 1) (UBIQUITIN CARRIER PROTEIN 1) |
| | | >gi\|1076424\|pir∥S43781 ubiquitin-conjugating enzyme UBC1 - Arabidopsis |
| | | thaliana >gi\|442594\|pdb\|1AA |
| 193 | 2028193 | 9E-43 >emb\|CAA67551\| (X99097) peroxidase [Arabidopsis thaliana] |
| | | Length = 328 |
| 194 | 2028194 | 1E-158 >gi\|3249096 (AC003114) Match to mRNA for importin alpha-like |
| | | protein 4 (impa4) gb\|Y14616 from A. thaliana. ESTs gb\|N96440, gb\|N37503, |
| | | gb\|N37498 and gb\|T42198 come from this gene. [Arabidopsis thaliana] Length = |
| 195 | 2028195 | Tyr_Phospho_Site(41-48) |
| 196 | 2028196 | Tyr_Phospho_Site(33-41) |
| 197 | 2028197 | 5E-29 >gi\|2924788 (AC002334) similar to disease resistance protein |
| | | [Arabidopsis thaliana] Length = 191 |
| 198 | 2028198 | 2E-54 >sp\|P42804\|HMA1_ARATH GLUTAMYL-TRNA REDUCTASE 1 |
| | | PRECURSOR (GLUTR) >gi\|454359 (U03774) glutamyl-tRNA reductase |
| | | [Arabidopsis thaliana] Length = 543 |
| 199 | 2028199 | 3′ Pkc_Phospho_Site(163-165) |
| 200 | 2028200 | 3′ 8E-65 >gi\|6094242\|sp\|O23264\|SBP_ARATH SELENIUM-BINDING |
| | | PROTEIN >gi\|2244759\|emb\|CAB10182.1\| (Z97335) selenium-binding protein like |
| | | [Arabidopsis thaliana] Length = 490 |
| 201 | 2028201 | 3′ Tyr_Phospho_Site(558-566) |
| 202 | 2028202 | 3′ 1E-56 >gi\|1483150\|dbj\|BAA12349\| (D84417) monodehydroascorbate |
| | | reductase [Arabidopsis thaliana] Length = 533 |
| 203 | 2028203 | 5′ Tyr_Phospho_Site(569-575) |
| 204 | 2028204 | 5′ 5E-43 >gi\|5262222\|emb\|CAB45848.1\| (AL080254) reticuline oxidase-like |
| | | protein [Arabidopsis thaliana] Length = 532 |
| 205 | 2028205 | 5′ 1E-59 >gi\|4337011\|gb\|AAD18035.1\| (AF119572) zinc-binding peroxisomal |
| | | integral membrane protein [Arabidopsis thaliana] Length = 381 |
| 206 | 2028206 | 5′ 3E-61 >gi\|1169601\|sp\|P46312\|FD6C_ARATH OMEGA-6 FATTY ACID |
| | | DESATURASE, CHLOROPLAST PRECURSOR >gi\|493068 (U09503) |
| | | chloroplast omega-6 fatty acid desaturase [Arabidopsis thaliana] Length = 418 |
| 207 | 2028207 | Pkc_Phospho_Site(63-65) |
| 208 | 2028208 | Tyr_Phospho_Site(733-741) |
| 209 | 2028209 | Tyr_Phospho_Site(648-656) |
| 210 | 2028210 | 3E-74 >gi\|2347098 (U76845) ubiquitin-specific protease [Arabidopsis |
| | | thaliana] >gi\|4490742\|emb\|CAB38904.1\| (AL035708) ubiquitin-specific protease |
| | | (AtUBP3) [Arabidopsis thaliana] Length = 371 |
| 211 | 2028211 | 1E-89 >sp\|P47927\|AP2_ARATH FLORAL HOMEOTIC PROTEIN APETALA2 |
| | | >gi\|533709 (U12546) APETALA2 protein [Arabidopsis thaliana] |
| | | >gi\|2464888\|emb\|CAB16765.1\| (Z99707) APETALA2 protein [Arabidopsis |
| | | thaliana] Length = 432 |
| 212 | 2028212 | Tyr_Phospho_Site(593-601) |
| 213 | 2028213 | Tyr_Phospho_Site(621-628) |
| 214 | 2028214 | Pkc_Phospho_Site(19-21) |
| 215 | 2028215 | 1E-59 >gi\|2688830 (AF000952) sugar transporter [Prunus armeniaca] |
| | | Length = 475 |
| 216 | 2028216 | Tyr_Phospho_Site(521-528) |
| 217 | 2028217 | Tyr_Phospho_Site(1176-1183) |
| 218 | 2028218 | Tyr_Phospho_Site(718-725) |
| 219 | 2028219 | Pkc_Phospho_Site 147-149 |
| 220 | 2028220 | Tyr_Phospho_Site(214-222) |
| 221 | 2028221 | 2E-22 >sp\|P11832\|NIA1_ARATH NITRATE REDUCTASE 1 (NR1) |
| | | >gi\|486751\|pir∥S35228 nitrate reductase (NADH) (EC 1.6.6.1) 1 - Arabidopsis |
| | | thaliana >gi\|22757\|emb\|CAA79494\| (Z19050) nitrate reductase [Arabidopsis |
| | | thaliana] >gi\|448286\|prf∥1916406A nitrate reductase [Arabidopsis thaliana] |
| | | Length = 917 |
| 222 | 2028222 | Tyr_Phospho_Site(217-224) |
| 223 | 2028223 | Tyr_Phospho_Site(875-882) |
| 224 | 2028224 | 1E-27 >sp\|Q39963\|ER1_HEVBR ETHYLENE-INDUCIBLE PROTEIN HEVER |
| | | >gi\|2129913\|pir∥S60047 ethylene-responsive protein 1 - Para rubber tree |
| | | >gi\|1209317 (M88254) ethylene-inducible protein [Hevea brasiliensis] Length = |
| | | 309 |
| 225 | 2028225 | 3′ Pkc_Phospho_Site(43-45) |
| 226 | 2028226 | 5′ Pkc_Phospho_Site(85-87) |
| 227 | 2028227 | 5′ Tyr_Phospho_Site(679-686) |
| 228 | 2028228 | 5′ Uch_2_1(102-117) |
| 229 | 2028229 | 5′ 7E-23 >gi\|2224933 (AF004216) ethylene-insensitive3 [Arabidopsis |
| | | thaliana] >gi\|2224935 (AF004217) ethylene-insensitive3 [Arabidopsis thaliana] |
| | | Length = 628 |
| 230 | 2028230 | Tyr_Phospho_Site(98-106) |
| 231 | 2028231 | 6E-26 >dbj\|BAA82637.1\| (D63136) Beta-tubulin [Zinnia elegans] Length = |
| | | 448 |
| 232 | 2028232 | Pkc_Phospho_Site(68-70) |
| 233 | 2028233 | Tyr_Phospho_Site(718-726) |
| 234 | 2028234 | 8E-52 >emb\|CAA05875\| (AJ003119) protein phosphatase 2C |
| | | [Arabidopsis thaliana] Length = 511 |
| 235 | 2028235 | 3E-67 >sp\|P45951\|ARP_ARATH APURINIC ENDONUCLEASE-REDOX |
| | | PROTEIN (DNA-(APURINIC OR APYRIMIDINIC SITE)LYASE) |
| | | >gi\|472869\|emb\|CAA54234\| (X76912) ARP protein [Arabidopsis thaliana] Length |
| | | = 527 |
| 236 | 2028236 | 5E-76 >gb\|AAF00669.1\|AC008153_21 (AC008153) unknown protein |
| | | [Arabidopsis thaliana] Length = 797 |
| 237 | 2028237 | Pkc_Phospho_Site(45-47) |
| 238 | 2028238 | 1E-55 >emb\|CAB38817.1\| (AL035679) fructose-bisphosphate aldolase |
| | | [Arabidopsis thaliana] Length = 343 |
| 239 | 2028239 | 3E-56 >gb\|AAD28617.1\|AF129087_1 (AF129087) mitogen-activated protein |
| | | kinase homologue [Medicago sativa] Length = 608 |
| 240 | 2028240 | Pkc_Phospho_Site(17-19) |
| 241 | 2028241 | 4E-29 >gb\|AAF00639.1\|AC009540_16 (AC009540) methionine synthase |
| | | [Arabidopsis thaliana] Length = 765 |
| 242 | 2028242 | 3′ Pkc_Phospho_Site(23-25) |
| 243 | 2028243 | 3′ 5E-17 >gi\|5929906\|gb\|AAD56636.1\|AF162150_1 (AF162150) COP1- |
| | | interacting protein CIP8 [Arabidopsis thaliana] Length = 334 |
| 244 | 2028244 | 3′ Tyr_Phospho_Site(566-573) |
| 245 | 2028245 | 3′ 1E-49 >gi\|3256068\|emb\|CAA74397\| (Y14068) Heat Shock Factor 3 |
| | | [Arabidopsis thaliana] Length = 520 |
| 246 | 2028246 | 5′ Pkc_Phospho_Site(165-167) |
| 247 | 2028247 | 5′ 4E-26 >gi\|123078\|sp\|P13723\|HEXA_DICDI BETA-HEXOSAMINIDASE |
| | | ALPHA CHAIN PRECURSOR (N-ACETYL-BETA-GLUCOSAMINIDASE) (BETA- |
| | | N-ACETYLHEXOSAMINIDASE) >gi\|84092\|pir∥A30766 beta-N- |
| | | acetylhexosaminidase (EC 3.2.1.52) A precursor - slime mold (Dictyostelium |
| | | discoideum) >gi\|167841 (J04065) beta-N-acetyl |
| 248 | 2028248 | 5′ Rgd(146-148) |
| 249 | 2028249 | 5′ Pkc_Phospho_Site(61-63) |
| 250 | 2028250 | 2E-37 >emb\|CAA09371.1\| (AJ010829) GRAB1 protein [Triticum sp.] |
| | | Length = 287 |
| 251 | 2028251 | 3E-84 >sp\|P46644\|AAT3_ARATH ASPARTATE AMINOTRANSFERASE, |
| | | CHLOROPLAST PRECURSOR (TRANSAMINASE A) >gi\|693692 (U15034) |
| | | aspartate aminotransferase [Arabidopsis thaliana] Length = 449 |
| 252 | 2028252 | 2E-17 >gb\|AAD11583.1\|AAD11583 (AF071527) hypothetical protein |
| | | [Arabidopsis thaliana] >gi\|4262169\|gb\|AAD14469\| (AC005275) hypothetical |
| | | protein [Arabidopsis thaliana] Length = 236 |
| 253 | 2028253 | 1E-58 >pir∥S57478 small GTP-binding protein - garden pea |
| | | >gi\|871508\|emb\|CAA90082\| (Z49902) small GTP-binding protein [Pisum sativum] |
| | | Length = 215 |
| 254 | 2028254 | 2E-21 >emb\|CAA16710.1\| (AL021687) RNase L inhibitor-like protein |
| | | [Arabidopsis thaliana] Length = 600 |
| 255 | 2028255 | 1E-35 >emb\|CAA16929.1\| (AL021768) resistance protein RPP5-like |
| | | [Arabidopsis thaliana] Length = 1715 |
| 256 | 2028256 | 8E-11 >sp\|P49208\|RK1_PEA 50S RIBOSOMAL PROTEIN L1, |
| | | CHLOROPLAST PRECURSOR >gi\|577089\|emb\|CAA58020\| (X82776) |
| | | chloroplast ribosomal protein L1 [Pisum sativum] Length = 208 |
| 257 | 2028257 | 2E-39 >dbj\|BAA25989\| (D89051) ERD6 protein [Arabidopsis thaliana] |
| | | Length = 496 |
| 258 | 2028258 | Pkc_Phospho_Site(71-73) |
| 259 | 2028259 | 7E-77 >gi\|3152587 (AC002986) Similar to CREB-binding protein |
| | | homolog gb\|U88570 from D. melanogaster and contains similarity to callus- |
| | | associated protein gb\|U01961 from Nicotiana tabacum. EST gb\|W43427 comes |
| | | from this gene. [Arabidopsis thaliana] Length = 1516 |
| 260 | 2028260 | 3E-27 >gi\|4038040 (AC005936) proteinase inhibitor II [Arabidopsis |
| | | thaliana] Length = 77 |
| 261 | 2028261 | 5E-54 >sp\|P25851\|F16P_ARATH FRUCTOSE-1,6-BISPHOSPHATASE, |
| | | CHLOROPLAST PRECURSOR (D-FRUCTOSE-1,6-BISPHOSPHATE 1- |
| | | PHOSPHOHYDROLASE) (FBPASE) >gi\|99693\|pir∥S16582 fructose- |
| | | bisphosphatase (EC 3.1.3.11) precursor, chloroplast - Arabidopsis thaliana |
| | | >gi\|11242\|emb\|CAA41154\| (X58148) fructose-bisphosphatase [Arabidopsis |
| | | thaliana] Length = 417 |
| 262 | 2028262 | 3′ Pkc_Phospho_Site(20-22) |
| 263 | 2028263 | 3′ Tyr_Phospho_Site(469-475) |
| 264 | 2028264 | 3′ 4E-60 >gi\|6358806\|gb\|AAF07386.1\|AC010675_9 (AC010675) peptide |
| | | transporter [Arabidopsis thaliana] Length = 644 |
| 265 | 2028265 | 5′ Tyr_Phospho_Site(290-297) |
| 266 | 2028266 | 5′ Tyr_Phospho_Site(359-367) |
| 267 | 2028267 | 5′ Tyr_Phospho_Site(357-365) |
| 268 | 2028268 | 5′ 1E-11 >gi\|1651723\|dbj\|BAA16651\| (D90899) phosphoglycerate mutase |
| | | [Synechocystis sp.] Length = 349 |
| 269 | 2028269 | 1E-101 >emb\|CAB52675.1\| (AJ010971) glucose-6-phosphate 1- |
| | | dehydrogenase [Arabidopsis thaliana] Length = 515 |
| 270 | 2028270 | Tyr_Phospho_Site(275-283) |
| 271 | 2028271 | 3E-20 >gi\|3252979 (AF068920) Ras-binding protein SUR-8 [Homo |
| | | sapiens] >gi\|3293320 (AF054828) leucine-rich repeat protein SHOC-2 [Homo |
| | | sapiens] Length = 582 |
| 272 | 2028272 | Pkc_Phospho_Site(137-139) |
| 273 | 2028273 | 3E-44 >dbj\|BAA06311\| (D30622) novel serine/threonine protein kinase |
| | | [Arabidopsis thaliana] Length = 421 |
| 274 | 2028274 | Rgd(348-350) |
| 275 | 2028275 | 6E-39 >sp\|P81291\|LE22_METJA 3-ISOPROPYLMALATE DEHYDRATASE |
| | | LARGE SUBUNIT (ISOPROPYLMALATE ISOMERASE) (ALPHA-IPM |
| | | ISOMERASE) (IPMI) >gi\|2127740\|pir∥C64362 aconitate hydratase (EC 4.2.1.3) - |
| | | Methanococcus jannaschii >gi\|1591201 (U67499) 3-isopropylmalate dehydratase |
| | | (leuC) [Methanococcus jannaschii] Length = 424 |
| 276 | 2028276 | 5E-83 >gi\|4106395 (AF073744) raffinose synthase [Cucumis sativus] |
| | | Length = 784 |
| 277 | 2028277 | Pkc_Phospho_Site(19-21) |
| 278 | 2028278 | Tyr_Phospho_Site(541-548) |
| 279 | 2028279 | 5E-39 >pdb\|1SOX\|A Chain A, Sulfite Oxidase From Chicken Liver |
| | | >gi\|3212611\|pdb\|1SOX\|B Chain B, Sulfite Oxidase From Chicken Liver Length = |
| | | 466 |
| 280 | 2028280 | 6E-45 >pir∥S20940 DNA-binding protein - Arabidopsis thaliana Length = |
| | | 246 |
| 281 | 2028281 | Tyr_Phospho_Site(452-460) |
| 282 | 2028282 | 1E-29 >gi\|473874 (U08285) a membrane-associated salt-inducible |
| | | protein [Nicotiana tabacum] Length = 435 |
| 283 | 2028283 | Tyr_Phospho_Site(278-285) |
| 284 | 2028284 | 9E-97 >gi\|1173624 (U34744) cytochrome P-450 [Phalaenopsis sp. |
| | | ‘hybrid SM9108’] Length = 426 |
| 285 | 2028285 | 8E-89 >gi\|1935914 (U77347) lethal leaf-spot 1 homolog [Arabidopsis |
| | | thaliana] Length = 539 |
| 286 | 2028286 | 3′ 2E-25 >gi\|2323344 (AF014806) alpha-glucosidase 1 [Arabidopsis |
| | | thaliana] Length = 902 |
| 287 | 2028287 | 3′ Pkc_Phospho_Site(97-99) |
| 288 | 2028288 | 3′ 3E-12 >gi\|6320470\|ref\|NP_010550.1\|AKR1\|Ankyrin repeat-containing |
| | | protein; Akr1p >gi\|728821\|sp\|P39010\|AKR1_YEAST ANKYRIN REPEAT- |
| | | CONTAINING PROTEIN AKR1 >gi\|626094\|pir∥S48521 AKR1 protein - yeast |
| | | (Saccharomyces cerevisiae) >gi\|466522 (L31407) ankyrin repeat-containing |
| | | protein [Saccharomyces cerevisiae] >gi\|1230637 (U51030) Akr1p: Ankyrin |
| | | repeat-containing protein (Swiss Prot. accession number P39010). |
| | | [Saccharomyces cerevisiae] >gi\|1586336\|prf∥2203403A ankyrin repeat- |
| | | containing protein [Saccharomyces cerevisiae] Length = 764 |
| 289 | 2028289 | 3′ Pkc_Phospho_Site(40-42) |
| 290 | 2028290 | 3′ 4E-43 >gi\|4726118\|gb\|AAD28318.1\|AC006436_9 (AC006436) somatic |
| | | embryogenesis receptor-like kinase [Arabidopsis thaliana] Length = 520 |
| 291 | 2028291 | 5′ Pkc_Phospho_Site(42-44) |
| 292 | 2028292 | 5′ 3E-15 >gi\|4539386\|emb\|CAB37452.1\| (AL035526) extensin-like protein |
| | | [Arabidopsis thaliana] Length = 839 |
| 293 | 2028293 | 5′ Tyr_Phospho_Site(720-727) |
| 294 | 2028294 | 5′ 2E-55 >gi\|2129597\|pir∥S71217 glutamate dehydrogenase 1 - Arabidopsis |
| | | thaliana >gi\|1098960 (U37771) glutamate dehydrogenase 1 [Arabidopsis |
| | | thaliana] >gi\|1293095 (U53527) glutamate dehydrogenase 1 [Arabidopsis |
| | | thaliana] Length = 411 |
| 295 | 2028295 | 3E-30 >gb\|AAD34702.1\|AC006341_30 (AC006341) Similar to gb\|D14414 Indole- |
| | | 3-acetic acid induced protein from Vigna radiata. ESTs gb\|AA712892 and |
| | | gb\|Z17613 come from this gene. [Arabidopsis thaliana] Length = 147 |
| 296 | 2028296 | 3E-11 >pir∥S47536 SWH1 protein (version 2) - yeast (Saccharomyces |
| | | cerevisiae) >gi\|402658\|emb\|CAA52646\| (X74552) SWH1 [Saccharomyces |
| | | cerevisiae] >gi\|1090523\|prf∥2019253A oxysterol-binding protein-like protein |
| | | [Saccharomyces cerevisiae] Length = 1190 |
| 297 | 2028297 | Tyr_Phospho_Site(8-16) |
| 298 | 2028298 | Tyr_Phospho_Site(397-404) |
| 299 | 2028299 | Pkc_Phospho_Site(15-17) |
| 300 | 2028300 | Pkc_Phospho_Site(221-223) |
| 301 | 2028301 | 6E-43 >pir∥S71229 RNA-binding protein 37 - Arabidopsis thaliana |
| | | >gi\|1174153 (U44134) RNA-binding protein [Arabidopsis thaliana] Length = 336 |
| 302 | 2028302 | Tyr_Phospho_Site(817-824) |
| 303 | 2028303 | 1E-90 >emb\|CAB43971.1 (AL078579) beta-glucosidase [Arabidopsis |
| | | thaliana] Length = 517 |
| 304 | 2028304 | Pkc_Phospho_Site(43-45) |
| 305 | 2028305 | Tyr_Phospho_Site(45-51) |
| 306 | 2028306 | 3′ Tyr_Phospho_Site(208-215) |
| 307 | 2028307 | 3′ 2E-33 >gi\|3776572 (AC005388) ESTs gb\|R65052, gb\|AA712146, |
| | | gb\|H76533, gb\|H76282, gb\|AA650771, gb\|H76287, gb\|AA650887, gb\|N37383, |
| | | gb\|Z29721 and gb\|Z29722 come from this gene. [Arabidopsis thaliana] Length = |
| | | 285 |
| 308 | 2028308 | 3′ 7E-11 >gi\|3560235\|emb\|CAA20703.1\| (AL031530) hypothetical zinc finger |
| | | protein [Schizosaccharomyces pombe] Length = 680 |
| 309 | 2028309 | 5′ Pkc_Phospho_Site(39-41) |
| 310 | 2028310 | 5′ Tyr_Phospho_Site(310-317) |
| 311 | 2028311 | 5′ Pkc_Phospho_Site(84-86) |
| 312 | 2028312 | 5′ Pkc_Phospho_Site(16-18) |
| 313 | 2028313 | Pkc_Phospho_Site(20-22) |
| 314 | 2028314 | 1E-12 >gi\|154692 (M73322) cellulase E-4 [Thermomonospora fusca] |
| | | Length = 376 |
| 315 | 2028315 | Pkc_Phospho_Site(92-94) |
| 316 | 2028316 | 2E-60 >gi\|2462824 (AF000657) similar to Jun activation domain binding |
| | | protein [Arabidopsis thaliana] >gi\|2791885 (AF042334) JAB1 [Arabidopsis |
| | | thaliana] Length = 357 |
| 317 | 2028317 | Tyr_Phospho_Site(725-733) |
| 318 | 2028318 | 4E-54 ) >gb\|AAD48837.1\|AF166351_1 (AF166351) alanine:glyoxylate |
| | | aminotransferase 2 homolog [Arabidopsis thaliana] Length = 476 |
| 319 | 2028319 | 6E-43 >sp\|P42731\|PAB2_ARATH POLYADENYLATE-BINDING PROTEIN 2 |
| | | (POLY(A) BINDING PROTEIN 2) (PABP 2) >gi\|304109 (L19418) poly(A)-binding |
| | | protein [Arabidopsis thaliana] >gi\|2911051\|emb\|CAA17561\| (AL021961) poly(A)- |
| | | binding protein[ |
| 320 | 2028320 | Pkc_Phospho_Site(41-43) |
| 321 | 2028321 | 2E-20 >dbj\|BAA25989\| (D89051) ERD6 protein [Arabidopsis thaliana] |
| | | Length = 496 |
| 322 | 2028322 | 6E-43 >sp\|Q42208\|RL7_ARATH 60S RIBOSOMAL PROTEIN L7 |
| | | >gi\|3212879 (AC004005) ribosomal protein L7 [Arabidopsis thaliana] Length = |
| | | 247 |
| 323 | 2028323 | 4E-11 >emb\|CAB53646.1\| (AL110123) multidrug resistance protein/P- |
| | | glycoprotein-like [Arabidopsis thaliana] Length = 1222 |
| 324 | 2028324 | 3′ 4E-18 >gi\|3941528 (AF062918) transcription factor [Arabidopsis |
| | | thaliana] Length = 335 |
| 325 | 2028325 | 3′ Tyr_Phospho_Site(808-815) |
| 326 | 2028326 | 3′ 1E-19 >gi\|1694711\|emb\|CAA70769\| (Y09581) FRO1 [Arabidopsis thaliana] |
| | | Length = 704 |
| 327 | 2028327 | 3′ 8E-12 >gi\|2894597\|emb\|CAA17131.1\| (AL021889) bHLH protein-like |
| | | [Arabidopsis thaliana] Length = 589 |
| 328 | 2028328 | 3′ 3E-28 >gi\|461812\|sp\|Q05047\|CP72_CATRO CYTOCHROME P450 72A1 |
| | | (CYPLXXII) (PROBABLE GERANIOL-10-HYDROXYLASE) (GE10H) >gi\|167484 |
| | | (L10081) Cytochrome P-450 protein [Catharanthus roseus] |
| | | >gi\|445604\|prf∥1909351A cytochrome P450 [Catharanthus roseus] Length = 524 |
| 329 | 2028329 | 3′ 2E-15 >gi\|400972\|sp\|P30986\|RETO_ESCCA RETICULINE OXIDASE |
| | | PRECURSOR (BERBERINE-BRIDGE-FORMING ENZYME) (BBE) |
| | | (TETRAHYDROPROTOBERBERINE SYNTHASE) >gi\|99506\|pir∥A41533 |
| | | reticuline oxidase (EC 1.5.3.9) precursor - California poppy >gi\|239110\|bbs\|65555 |
| | | (S65550) (S)-reticuline:oxygen oxidoreductas |
| 330 | 2028330 | 5′ Tyr_Phospho_Site(71-79) |
| 331 | 2028331 | 5′ 2E-69 >gi\|123340\|sp\|P14891\|HMD1_ARATH 3-HYDROXY-3- |
| | | METHYLGLUTARYL-COENZYME A REDUCTASE 1 (HMG-COA REDUCTASE |
| | | 1) (HMGR1) >gi\|99714\|pir∥A32107 hydroxymethylglutaryl-CoA reductase |
| | | (NADPH) (EC 1.1.1.34) - Arabidopsis thaliana >gi\|16336\|emb\|CAA33139\| |
| | | (X15032) hydroxy methylglutaryl CoA reductase |
| 332 | 2028332 | 5′ 3E-19 >gi\|5731257\|gb\|AAD48836.1\|AF165924_1 (AF165924) auxin- |
| | | induced basic helix-loop-helix transcription factor [Gossypium hirsutum] Length = |
| | | 314 |
| 333 | 2028333 | 5′ Pkc_Phospho_Site(22-24) |
| 334 | 2028334 | 5′ Tyr_Phospho_Site(17-24) |
| 335 | 2028335 | Tyr_Phospho_Site(1196-1204) |
| 336 | 2028336 | 1E-53 >sp\|Q08467\|KC21_ARATH CASEIN KINASE II, ALPHA CHAIN 1 (CK |
| | | II) >gi\|419752\|pir∥S31098 casein kinase II (EC 2.7.1 .-) alpha-type chain (clone |
| | | ATCKA1) - Arabidopsis thaliana >gi\|391603\|dbj\|BAA01090\| (D10246) casein |
| | | kinase II catalytic subunit [Arabidopsis thaliana] Length = 33 |
| 337 | 2028337 | 4E-28 >sp\|O24164\|PPOM_TOBAC PROTOPORPHYRINOGEN OXIDASE, |
| | | MITOCHONDRIAL (PPO II) (PROTOPORPHYRINOGEN IX OXIDASE ISOZYME |
| | | II) (PPX II) >gi\|2370335\|emb\|CAA73866\| (Y13466) protoporphyrinogen oxidase |
| | | [Nicotiana tabacum] >gi\|3929920\|dbj\|BAA34712\| (AB020500) mitochondrial |
| | | protoporphyrino |
| 338 | 2028338 | 2E-50 >emb\|CAA63010\| (X91917) LEA D113 homologue type2 |
| | | [Arabidopsis thaliana] >gi\|3668076 (AC004667) LEA D113 type2 protein |
| | | [Arabidopsis thaliana] Length = 97 |
| 339 | 2028339 | 4E-12 >gi\|2224915 (U95968) beta-expansin [Oryza sativa] Length = 261 |
| 340 | 2028340 | Tyr_Phospho_Site(494-501) |
| 341 | 2028341 | 3E-18 >sp\|P54926\|MYO1_LYCES MYO-INOSITOL-1(OR 4)- |
| | | MONOPHOSPHATASE 1 (IMP 1)(INOSITOL MONOPHOSPHATASE 1) |
| | | >gi\|1098977 (U39444) myo-inositol monophosphatase 1 [Lycopersicon |
| | | esculentum] Length = 273 |
| 342 | 2028342 | Pkc_Phospho_Site(8-10) |
| 343 | 2028343 | Pkc_Phospho_Site(13-15) |
| 344 | 2028344 | Tyr_Phospho_Site(665-672) |
| 345 | 2028345 | 9E-65 >emb\|CAA74028.1\| (Y13694) multicatalytic endopeptidase complex, |
| | | proteasome precursor, beta subunit [Arabidopsis thaliana] |
| | | >gi\|2827525\|emb\|CAA16533.1\| (AL021633) multicatalytic endopeptidase |
| | | complex, proteasome precu |
| 346 | 2028346 | Tyr_Phospho_Site(314-321) |
| 347 | 2028347 | 1E-52 >gi\|3540183 (AC004122) Highly Similar to branched-chain amino |
| | | acid aminotransferase [Arabidopsis thaliana] Length = 318 |
| 348 | 2028348 | 2E-11 >emb\|CAB10522.1\| (Z97343) DNA-binding protein homolog |
| | | [Arabidopsis thaliana] Length = 459 |
| 349 | 2028349 | 7E-15 >emb\|CAA69072\| (Y07765) S-adenosylmethionine decarboxylase |
| | | [Arabidopsis thaliana] Length = 51 |
| 350 | 2028350 | 2E-27 >sp\|P19954\|RR30_SPIOL 30S RIBOSOMAL PROTEIN S30, |
| | | CHLOROPLAST PRECURSOR (CS-S5) (CS5) (S22) (RIBOSOMAL PROTEIN 1) |
| | | (PSRP-1) >gi\|279640\|pir∥R3SPS5 ribosomal protein CS-S22 precursor, |
| | | chloroplast - spinach >gi\|12316\|emb\|CAA41960\| (X59270) chloroplast ribosomal |
| | | protein S22 [Spinacia oleracea] >gi\|18031\|emb\|CAA33403\| (X15344) spinach |
| | | S22 r-protein [Spinacia oleracea] Length = 302 |
| 351 | 2028351 | 3′ Tyr_Phospho_Site(344-350) |
| 352 | 2028352 | 5′ 3E-65 >gi\|3164126\|dbj\|BAA28531\| (D78598) cytochrome P450 |
| | | monooxygenase [Arabidopsis thaliana] >gi\|5262761\|emb\|CAB45909.1\| |
| | | (AL080283) cytochrome P450 monooxygenase [Arabidopsis thaliana] Length = |
| | | 499 |
| 353 | 2028353 | 5′ 1E-76 >gi\|5915830\|sp\|Q96514\|C7B7_ARATH CYTOCHROME P450 71B7 |
| | | >gi\|1523796\|emb\|CAA66458\| (X97864) cytochrome P450 [Arabidopsis thaliana] |
| | | >gi\|4850394\|gb\|AAD31064.1\|AC007357_13 (AC007357) Identical to gb\|X97864 |
| | | cytochrome P450 from Arabidopsis thaliana and is a member of the PF\|00067 |
| | | Cytochrome |
| 354 | 2028354 | 5′ Tyr_Phospho_Site(209-216) |
| 355 | 2028355 | 5′ Tyr_Phospho_Site(823-831) |
| 356 | 2028356 | 5′ Pkc_Phospho_Site(6-8) |
| 357 | 2028357 | 5′ 3E-45 >gi\|5541691\|emb\|CAB51197.1\| (AL096859) glucuronosyl |
| | | transferase-like protein (fragment) [Arabidopsis thaliana] Length = 271 |
| 358 | 2028358 | 4E-39 >gi\|3201623 (AC004669) shaggy-like kinase dzeta [Arabidopsis |
| | | thaliana] Length = 412 |
| 359 | 2028359 | Pkc_Phospho_Site(2-4) |
| 360 | 2028360 | Tyr_Phospho_Site(638-645) |
| 361 | 2028361 | Tyr_Phospho_Site(297-304) |
| 362 | 2028362 | 5E-83 >gi\|2275196 (AC002337) water stress-induced protein, WSI76 |
| | | isolog [Arabidopsis thaliana] >gi\|4630746\|gb\|AAD26596.1\|AC007236_1 |
| | | (AC007236) water stress-induced protein [Arabidopsis thaliana] Length = 344 |
| 363 | 2028363 | 4E-76 ) >gb\|AAD201131 (AC006304) proline iminopeptidase [Arabidopsis |
| | | thaliana] Length = 329 |
| 364 | 2028364 | 1E-48 >emb\|CAA66964\| (X98320) peroxidase [Arabidopsis thaliana] |
| | | >gi\|1429215\|emb\|CAA67310\| (X98774) peroxidase ATP6a [Arabidopsis thaliana] |
| | | Length = 336 |
| 365 | 2028365 | 3E-31 >gb\|AAB95298.1\| (AC003105) beta-ketoacyl-CoA synthase |
| | | [Arabidopsis thaliana] Length = 509 |
| 366 | 2028366 | Tyr_Phospho_Site(370-378) |
| 367 | 2028367 | 1E-39 >emb\|CAA65384\| (X96539) malate dehydrogenase |
| | | [Mesembryanthemum crystallinum] Length = 332 |
| 368 | 2028368 | 3′ Tyr_Phospho_Site(176-183) |
| 369 | 2028369 | 3′ Pkc_Phospho_Site(10-12) |
| 370 | 2028370 | 3′ 2E-52 >gi\|2739376 (AC002505) permease [Arabidopsis thaliana] |
| | | Length = 551 |
| 371 | 2028371 | 3′ 2E-53 >gi\|2316016 (U92650) MRP-like ABC transporter |
| | | [Arabidopsis thaliana] Length = 1515 |
| 372 | 2028372 | 3′ Tyr_Phospho_Site(414-420) |
| 373 | 2028373 | 5′ Tyr_Phospho_Site(10-17) |
| 374 | 2028374 | 5′ 5E-77 >gi\|2129553\|pir∥S71774 calcium-dependent protein kinase 6 - |
| | | Arabidopsis thaliana Length = 529 |
| 375 | 2028375 | 5′ Pkc_Phospho_Site(53-55) |
| 376 | 2028376 | 5′ 1E-42 >gi\|1495768\|emb\|CAA92823\| (Z68506) chloroplast inner envelope |
| | | protein, 110 kD (IEP110) [Pisum sativum] Length = 996 |
| 377 | 2028377 | 5′ 2E-75 >gi\|3914425\|sp\|O23717\|PRCE_ARATH PROTEASOME EPSILON |
| | | CHAIN PRECURSOR (MACROPAIN EPSILON CHAIN) (MULTICATALYTIC |
| | | ENDOPEPTIDASE COMPLEX EPSILON CHAIN) >gi\|2511596\|emb\|CAA74029.1\| |
| | | (Y13695) multicatalytic endopeptidase complex, proteasome precursor, beta |
| | | subunit [Arabidopsis thaliana] >gi\| |
| 378 | 2028378 | 3E-48 ) >gi\|2088650 (AF002109) peroxisomal ATP/ADP carrier protein |
| | | isolog [Arabidopsis thaliana] Length = 331 |
| 379 | 2028379 | Pkc_Phospho_Site(40-42) |
| 380 | 2028380 | 3E-16 >gb\|AAD39612.1\|AC007454_11 (AC007454) Similar to gb\|X92204 NAM |
| | | gene product from Petunia hybrida. ESTs gb\|H36656 and gb\|AA651216 come |
| | | from this gene. [Arabidopsis thaliana] Length = 557 |
| 381 | 2028381 | 8E-79 >emb\|CAA65051\| (X95736) amino acid permease 6 [Arabidopsis |
| | | thaliana] Length = 481 |
| 382 | 2028382 | Pkc_Phospho_Site(65-67) |
| 383 | 2028383 | 3E-18 >gb\|AAD46412.1\|AF096262_1 (AF096262) ER6 protein [Lycopersicon |
| | | esculentum] Length = 168 |
| 384 | 2028384 | 1E-81 >gi\|2827139 (AF027172) cellulose synthase catalytic subunit |
| | | [Arabidopsis thaliana] >gi\|4049343\|emb\|CAA22568.1\| (AL034567) cellulose |
| | | synthase catalytic subunit (RSW1) [Arabidopsis thaliana] Length = 1081 |
| 385 | 2028385 | Pkc_Phospho_Site(9-11) |
| 386 | 2028386 | 6E-13 >gi\|2342674 (AC000106) Similar to ATP-dependent Clp protease |
| | | (gb\|D90915). EST gb\|N65461 comes from this gene. [Arabidopsis thaliana] |
| | | Length = 292 |
| 387 | 2028387 | 7E-46 >gb\|AAD29776.1\|AF074021_8 (AF074021) symbiosis-related protein |
| | | [Arabidopsis thaliana] Length = 122 |
| 388 | 2028388 | 4E-41 >dbj\|BAA07555\| (D38552) The ha1539 protein is related to |
| | | cyclophilin. [Homo sapiens] Length = 645 |
| 389 | 2028389 | Tyr_Phospho_Site(858-864) |
| 390 | 2028390 | 1E-49 >pir∥S71265 ferritin - Arabidopsis thaliana |
| | | >gi\|1246401\|emb\|CAA63932\| (X94248) ferritin [Arabidopsis thaliana] Length = |
| | | 255 |
| 391 | 2028391 | Tyr_Phospho_Site(582-588) |
| 392 | 2028392 | 3′ Pkc_Phospho_Site(34-36) |
| 393 | 2028393 | 3′ Tyr_Phospho_Site(231-239) |
| 394 | 2028394 | 3′ Pkc_Phospho_Site(31-33) |
| 395 | 2028395 | 3′ 6E-25 >gi\|2098713 (U82977) pectinesterase [Citrus sinensis] |
| | | Length = 510 |
| 396 | 2028396 | 3′ Tyr_Phospho_Site(93-100) |
| 397 | 2028397 | 5′ Tyr_Phospho_Site(287-293) |
| 398 | 2028398 | 5′ Pkc_Phospho_Site(22-24) |
| 399 | 2028399 | 5′ Pkc_Phospho_Site(37-39) |
| 400 | 2028400 | 5′ 2E-36 >gi\|1170170\|sp\|P46602\|HAT3_ARATH HOMEOBOX-LEUCINE |
| | | ZIPPER PROTEIN HAT3 (HD-ZIP PROTEIN 3) >gi\|549889 (U09338) homeobox |
| | | protein [Arabidopsis thaliana] >gi\|549890 (U09339) homeobox protein |
| | | [Arabidopsis thaliana] Length = 315 |
| 401 | 2028401 | Tyr_Phospho_Site(384-390) |
| 402 | 2028402 | 1E-54 >sp\|P43188\|KADC_MAIZE ADENYLATE KINASE, CHLOROPLAST |
| | | (ATP-AMP TRANSPHOSPHORYLASE) >gi\|629863\|pir∥S45634 adenylate kinase |
| | | (EC 2.7.4.3), chloroplast - maize >gi\|3114421\|pdb\|1ZAK\|A Chain A, Adenylate |
| | | Kinase From Maize In Complex With The Inhibitor P1,P5-Bis(Adenosine-5′- |
| | | )pentaphosphate (Ap5a) >gi\|3114422\|pdb\|1ZAK\|B Chain B, Adenylate Kinase |
| | | From Maize In Complex With The Inhibitor P1,P5-Bis(Adenosine-5′- |
| | | )pentaphosphate (Ap5a) Length = 222 |
| 403 | 2028403 | 1E-101 >sp\|P54888\|P5C2_ARATH DELTA 1-PYRROLINE-5-CARBOXYLATE |
| | | SYNTHETASE B (P5CS B) INCLUDES: GLUTAMATE 5-KINASE (GAMMA- |
| | | GLUTAMYL KINASE) (GK); GAMMA-GLUTAMYL PHOSPHATE REDUCTASE |
| | | (GPR) (GLUTAMATE-5-SEMIALDEHYDE DEHYDROGENASE) (GLUTAMYL- |
| | | GAMMA-SEMIALDE . . . >gi\|887388\|emb\|CAA60447\| (X86778) pyrroline-5- |
| | | carboxylate synthetase B [Arabidopsis thaliana] >gi\|1669658\|emb\|CAA70527\| |
| | | (Y09355) pyrroline-5-carboxlyate synthetase [Arabidopsis thaliana] Length = 726 |
| 404 | 2028404 | Tyr_Phospho_Site(585-592) |
| 405 | 2028405 | 6E-40 >pir∥HSWT4 histone H4 - wheat >gi\|70773\|pir∥HSPM4 histone |
| | | H4 - garden pea Length = 102 |
| 406 | 2028406 | Tyr_Phospho_Site(329-336) |
| 407 | 2028407 | Pkc_Phospho_Site(117-119) |
| 408 | 2028408 | 3E-93 >gb\|AAD16946\| (AF106324) sodium proton exchanger Nhx1 |
| | | [Arabidopsis thaliana] Length = 538 |
| 409 | 2028409 | Tyr_Phospho_Site(852-860) |
| 410 | 2028410 | Pkc_Phospho_Site(66-68) |
| 411 | 2028411 | 3′ 2E-18 >gi\|629728\|pir∥S46959 porin I, 36K - potato |
| | | >gi\|1076680\|pir∥C55364 porin (clone pPOM 36.1) - potato mitochoridrion |
| | | >gi\|515358\|emb\|CAA56601\| (X80388) 36 kDa porin I [Solanum tuberosum] |
| | | Length = 276 |
| 412 | 2028412 | 3′ Tyr_Phospho_Site(330-337) |
| 413 | 2028413 | 3′ Tyr_Phospho_Site(208-215) |
| 414 | 2028414 | 3′ Pkc_Phospho_Site(55-57) |
| 415 | 2028415 | 3′ 1E-23 >gi\|2499535\|sp\|Q41364\|SOT1_SPIOL 2-OXOGLUTARATE/MALATE |
| | | TRANSLOCATOR PRECURSOR >gi\|595681 (U13238) 2-oxoglutarate/malate |
| | | translocator [Spinacia oleracea] Length = 569 |
| 416 | 2028416 | 3′ 1E-10 >gi\|99749\|pir∥S20918 probable serine/threonine-specific protein |
| | | kinase ATPK64 (EC 2.7.1 .-) - Arabidopsis thaliana >gi\|217843\|dbj\|BAA01731\| |
| | | (D10937) protein kinase [Arabidopsis thaliana] Length = 498 |
| 417 | 2028417 | 3′ Tyr_Phospho_Site(693-701) |
| 418 | 2028418 | 3′ Pkc_Phospho_Site(115-117) |
| 419 | 2028419 | 5′ Pkc_Phospho_Site(2-4) |
| 420 | 2028420 | 5′ 6E-77 >gi\|5730139\|emb\|CAB52472.1\| (AJ243705) ferredoxin-NADP+ |
| | | reductase [Arabidopsis thaliana] Length = 360 |
| 421 | 2028421 | 5′ Rgd(605-607) |
| 422 | 2028422 | 8E-13 >gb\|AAD41415.1\|AC007727_4 (AC007727) Contains similarity to |
| | | gb\|U07707 epidermal growth factor receptor substrate (eps15) from Homo |
| | | sapiens and contains 2 PF\|00036 EF hand domains. ESTs gb\|T44428 and |
| | | gb\|AA395440 come from this gene. [Arabidop . . . Length = 1181 |
| 423 | 2028423 | Tyr_Phospho_Site(412-419) |
| 424 | 2028424 | 9E-72 >gb\|AAD32285.1\|AC006533_9 (AC006533) poly(ADP-ribose) |
| | | glycohydrolase [Arabidopsis thaliana] Length = 997 |
| 425 | 2028425 | Tyr_Phospho_Site(77-84) |
| 426 | 2028426 | Tyr_Phospho_Site(800-807) |
| 427 | 2028427 | 1E-22 >ref\|NP_004658.1\|PHERC2\| hect domain and RLD 2 |
| | | >gi\|4079809\|gb\|AAD08657.1\| (AF071172) HERC2 [Homo sapiens] Length = |
| | | 4834 |
| 428 | 2028428 | Rgd(235-237) |
| 429 | 2028429 | Tyr_Phospho_Site(399-406) |
| 430 | 2028430 | 6E-54 >gi\|2739368 (AC002505) cyclin-like protein [Arabidopsis thaliana] |
| | | Length = 361 |
| 431 | 2028431 | 6E-46 >gb\|AAD21729.1\| (AC006931) citrate synthase [Arabidopsis |
| | | thaliana] Length = 509 |
| 432 | 2028432 | 2E-45 >gi\|2459448 (AC002332) cinnamoyl-CoA reductase [Arabidopsis |
| | | thaliana] Length = 321 |
| 433 | 2028433 | 1E-27 >gb\|AAD39990.1\|AF150083_1 (AF150083) small zinc finger-like protein |
| | | [Arabidopsis thaliana] Length = 77 |
| 434 | 2028434 | 2E-44 >gi\|2829133 (AF043351) adenosine-5′-phosphosulfate-kinase |
| | | [Arabidopsis thaliana] >gi\|4490745\|emb\|CAB38907.1\| (AL035708) adenosine-5′- |
| | | phosphosulfate-kinase [Arabidopsis thaliana] Length = 293 |
| 435 | 2028435 | Pkc_Phospho_Site(21-23) |
| 436 | 2028436 | 2E-47 >dbj\|BAA77358.1\| (AB020023) DNA-binding protein NtWRKY3 |
| | | [Nicotiana tabacum] Length = 328 |
| 437 | 2028437 | Pkc_Phospho_Site(41-43) |
| 438 | 2028438 | 3′ Tyr_Phospho_Site(28-35) |
| 439 | 2028439 | 3′ Tyr_Phospho_Site(210-217) |
| 440 | 2028440 | 3′ 5E-18 >gi\|2827665\|emb\|CAA16619.1\| (AL021637) vacuolar sorting |
| | | receptor-like protein [Arabidopsis thaliana] Length = 626 |
| 441 | 2028441 | 3′ 3E-25 >gi\|1419090\|emb\|CAA64422\| (X94968) 37 kDa chloroplast inner |
| | | envelope membrane polypeptide precursor [Nicotiana tabacum] Length = 335 |
| 442 | 2028442 | 3′ Tyr_Phospho_Site(681-688) |
| 443 | 2028443 | 3′ 8E-69 >gi\|5921663\|gb\|AAD56290.1\|AF162279_1 (AF162279) 10- |
| | | formyltetrahydrofolate synthetase [Arabidopsis thaliana] Length = 634 |
| 444 | 2028444 | 5′ Tyr_Phospho_Site(422-428) |
| 445 | 2028445 | 5′ 7E-53 >gi\|3914097\|sp\|O49071\|MYOP_MESCR MYO-INOSITOL-1(OR 4)- |
| | | MONOPHOSPHATASE (IMP) (INOSITOL MONOPHOSPHATASE) gi\|2708322 |
| | | (AF037220) inositol monophosphatase [Mesembryanthemum crystallinium] |
| | | Length = 270 |
| 446 | 2028446 | 5′ 2E-26 >gi\|2921323\|gb\|AAC04713.1\| (AF034112) beta-1,3-glucanase 7 |
| | | [Glycine max] Length = 245 |
| 447 | 2028447 | 5′ Tyr_Phospho_Site(102-109) |
| 448 | 2028448 | Pkc_Phospho_Site(17-19) |
| 449 | 2028449 | Tyr_Phospho_Site(658-664) |
| 450 | 2028450 | 1E-23 >emb\|CAA18991\| (AL023518) transport protein |
| | | [Schizosaccharomyces pombe] Length = 397 |
| 451 | 2028451 | 1E-106 >gi\|2737926 (U77673) fimbrin-like protein AtFim2 [Arabidopsis |
| | | thaliana] Length = 456 |
| 452 | 2028452 | 4E-84 >gi\|3643604 (AC005395) receptor-like protein kinase |
| | | [Arabidopsis thaliana] Length = 960 |
| 453 | 2028453 | Pkc_Phospho_Site(7-9) |
| 454 | 2028454 | Tyr_Phospho_Site(1156-1162) |
| 455 | 2028455 | 2E-70 >gi\|4098521 (U79160) HMG-CoA synthase [Arabidopsis thaliana] |
| | | >gi\|4098523 (U79161) HMG-CoA synthase [Arabidopsis thaliana] |
| | | >gi\|5002517\|emb\|CAB44320.1 (AL078606) hydroxymethylglutaryl-CoA synthase |
| | | [Arabidopsis thaliana] Length = 461 |
| 456 | 2028456 | 3E-72 >gi\|2583111 (AC002387) dihydrodipicolinate synthase |
| | | [Arabidopsis thaliana] Length = 365 |
| 457 | 2028457 | 9E-79 ) >emb\|CAA35887\| (X51514) precursor acetolactate synthase (670 |
| | | AA) [Arabidopsis thaliana] Length = 670 |
| 458 | 2028458 | 4E-86 ) >dbj\|BAA84380.1\| (AP000423) PSII D2 protein [Arabidopsis |
| | | thaliana] Length = 353 |
| 459 | 2028459 | 2E-67 >emb\|CAA76758.1\| (Y17386) In2.1 protein [Triticum aestivum] |
| | | Length = 243 |
| 460 | 2028460 | Pkc_Phospho_Site(45-47) |
| 461 | 2028461 | Tyr_Phospho_Site(349-357) |
| 462 | 2028462 | Tyr_Phospho_Site(303-310) |
| 463 | 2028463 | 3′ 1E-28 >gi\|4106340\|gb\|AAD02810\| (AF062396) protein phosphatase 2A |
| | | regulatory subunit isoform B′ delta [Arabidopsis thaliana] Length = 477 |
| 464 | 2028464 | 3′ 5E-41 >gi\|4185133 (AC005724) zinc finger protein [Arabidopsis |
| | | thaliana] Length = 181 |
| 465 | 2028465 | 3′ 1E-44 >gi\|4678357\|emb\|CAB41167.1\| (AL049659) cytochrome P450-like |
| | | protein [Arabidopsis thaliana] Length = 490 |
| 466 | 2028466 | 5′ Pkc_Phospho_Site(82-84) |
| 467 | 2028467 | 5′ 1E-31 >gi\|2500185\|sp\|Q23862\|RACE_DICDI RAS-RELATED PROTEIN |
| | | RACE >gi\|1373067 (U41222) RacE [Dictyostelium discoideum] Length = 223 |
| 468 | 2028468 | 5′ 8E-74 >gi\|4587685\|gb\|AAD25855.1\|AC007197_8 (AC007197) |
| | | methylmalonate semi-aldehyde dehydrogenase [Arabidopsis thaliana] Length = |
| | | 607 |
| 469 | 2028469 | 5′ 2E-72 >gi\|2494174\|sp\|Q42521\|DCE1_ARATH GLUTAMATE |
| | | DECARBOXYLASE 1 (GAD 1) >gi\|497979 (U10034) glutamate decarboxylase |
| | | [Arabidopsis thaliana] Length = 502 |
| 470 | 2028470 | 5′ 6E-75 >gi\|5669047\|gb\|AAD46145.1\| (AF081573) 19S proteasome |
| | | regulatory complex subunit S6A [Arabidopsis thaliana] Length = 424 |
| 471 | 2028471 | 5′ Pkc_Phospho_Site(20-22) |
| 472 | 2028472 | 5′ 3E-71 >gi\|2501056\|sp\|Q39230\|SYS_ARATH SERYL-TRNA SYNTHETASE |
| | | (SERINE-TRNA LIGASE) (SERRS) >gi\|2129737\|pir∥S71293 seryl-tRNA |
| | | synthetase - [Arabidopsis thaliana >gi\|1359497\|emb\|CAA94388\| (Z70313) seryl- |
| | | tRNA Synthetase [Arabidopsis thaliana] Length = 451 |
| 473 | 2028473 | Pkc_Phospho_Site(49-51) |
| 474 | 2028474 | Pkc_Phospho_Site(26-28) |
| 475 | 2028475 | Tyr_Phospho_Site(217-225) |
| 476 | 2028476 | 4E-81 >emb\|CAA67336\| (X98804) peroxidase ATP18a [Arabidopsis |
| | | thaliana] Length = 346 |
| 477 | 2028477 | 4E-34 >sp\|P56286\|IF2A_SCHPO EUKARYOTIC TRANSLATION INITIATION |
| | | FACTOR 2 ALPHA SUBUNIT (EIF-2-ALPHA) >gi\|2706460\|emb\|CAA15918.1\| |
| | | (AL021046) eukaryotic translation initiation factor 2 alpha subunit |
| | | [Schizosaccharomyces pombe] Length = 306 |
| 478 | 2028478 | 1E-117 >sp\|P54609\|CC48_ARATH CELL DIVISION CYCLE PROTEIN 48 |
| | | HOMOLOG >gi\|2118115\|pir∥S60112 cell division control protein CDC48 homolog |
| | | - Arabidopsis thaliana >gi\|1019904 (U37587) cell division cycle protein |
| | | [Arabidopsis thaliana] Length = 809 |
| 479 | 2028479 | 2E-84 >emb\|CAA23006\| (AL035356) mitochondrial uncoupling protein |
| | | [Arabidopsis thaliana] Length = 313 |
| 480 | 2028480 | 7E-11 >gi\|3335347 (AC004512) Contains similarity to ARI, RING finger |
| | | protein gb\|X98309 from Drosophila melanogaster. ESTs gb\|T44383, gb\|W43120, |
| | | gb\|N65868, gb\|H36013, gb\|AA042241, gb\|T76869 and gb\|AA042359 come from |
| | | this gene. [Arabidopsis thaliana] Length = 644 |
| 481 | 2028481 | 1E-63 >gi\|682728 (L40031) S-adenosyl-L-methionine:trans-caffeoyl- |
| | | Coenzyme A 3-O-methyltransferase [Arabidopsis thaliana] Length = 212 |
| 482 | 2028482 | 1E-22 >gi\|3687243 (AC005169) ribosomal protein [Arabidopsis |
| | | thaliana] Length = 68 |
| 483 | 2028483 | 7E-42 >gi\|3415115 (AF081202) villin 2 [Arabidopsis thaliana] Length = |
| | | 976 |
| 484 | 2028484 | Tyr_Phospho_Site(204-211) |
| 485 | 2028485 | Tyr_Phospho_Site(58-65) |
| 486 | 2028486 | 3′ 8E-18 >gi\|2804278\|dbj\|BAA24448\| (AB003516) squalene epoxidase [Panax |
| | | ginseng] Length = 539 |
| 487 | 2028487 | 3′ 5E-20 >gi\|3914394\|sp\|Q42908\|PMGI_MESCR 2,3- |
| | | BISPHOSPHOGLYCERATE-INDEPENDENT PHOSPHOGLYCERATE MUTASE |
| | | (PHOSPHOGLYCEROMUTASE) (BPG-INDEPENDENT PGAM) (PGAM-I) |
| | | >gi\|2118335\|pir∥S60473 phosphoglycerate mutase (EC 5.4.2.1) - common ice |
| | | plant >gi\|602426 (U16021) phosphoglyceromutase [Mesembryanthemum |
| | | crystallinum] Length = 559 |
| 488 | 2028488 | 3′ Wd_Repeats(594-608) |
| 489 | 2028489 | 3′ Pkc_Phospho_Site(4-6) |
| 490 | 2028490 | 5′ 6E-69 >gi\|5738864\|emb\|CAA63220.1\| (X92486) isocitrate dehydrogenase |
| | | (NAD+) [Solanum tuberosum] Length = 470 |
| 491 | 2028491 | 5′ 2E-74 >gi\|4927412\|gb\|AAD33097.1\|AF082525_1 (AF082525) homoserine |
| | | kinase [Arabidopsis thaliana] Length = 370 |
| 492 | 2028492 | 5′ 1E-60 >gi\|3128168 (AC004521) carboxyl-terminal peptidase |
| | | [Arabidopsis thaliana] Length = 415 |
| 493 | 2028493 | 5′ Pkc_Phospho_Site(41-43) |
| 494 | 2028494 | 5′ 3E-62 >gi\|4006869\|emb\|CAB16787.1\| (Z99707) patatin-like protein |
| | | [Arabidopsis thaliana] Length = 414 |
| 495 | 2028495 | 3E-18 >gi\|3139079 (AF062537) cullin 3 [Homo sapiens] Length = 768 |
| 496 | 2028496 | Tyr_Phospho_Site(1069-1076) |
| 497 | 2028497 | 1E-63 >gb\|AAC27707.1\| (AF067789) tSNARE AtTLG2a [Arabidopsis |
| | | thaliana] Length = 322 |
| 498 | 2028498 | 9E-36 >gi\|4091806 (AF052585) CONSTANS-like protein 2 [Malus |
| | | domestica] Length = 329 |
| 499 | 2028499 | 9E-21 >gi\|2191133 (AF007269) Arabidopsis thaliana G-box binding |
| | | factor 2 (SP:P42774) [Arabidopsis thaliana] Length = 380 |
| 500 | 2028500 | 4E-50 >gi\|3650032 (AC005396) gibberellin-regulated protein GAST1- |
| | | like [Arabidopsis thaliana] Length = 108 |
| 501 | 2028501 | 1E-27 >sp\|Q96330\|FLAV_ARATH FLAVONOL SYNTHASE (FLS) |
| | | >gi\|1628622 (U72631) flavonol synthase [Arabidopsis thaliana] >gi\|1805305 |
| | | (U84258) flavonol synthase [Arabidopsis thaliana] >gi\|1805307 (U84259) flavonol |
| | | synthase [Arabidopsis thaliana] >gi\|1805309 (U84260) flavonol synthase |
| | | [Arabidopsis thaliana] Length = 336 |
| 502 | 2028502 | 4E-61 >gi\|3176686 (AC003671) Similar to high affinity potassium |
| | | transporter, HAK1 protein gb\|U22945 from Schwanniomyces occidentalis. |
| | | [Arabidopsis thaliana] Length = 764 |
| 503 | 2028503 | 4E-61 >sp\|P15455\|12S1_ARATH 12S SEED STORAGE PROTEIN |
| | | PRECURSOR >gi\|81604\|pir∥S08509 cruciferin precursor (CRA1) - Arabidopsis |
| | | thaliana >gi\|166676 (M37247) 12S storage protein CRA1 [Arabidopsis thaliana] |
| | | >gi\|808936\|emb\|CAA3249 |
| 504 | 2028504 | Tyr_Phospho_Site(13-20) |
| 505 | 2028505 | 3E-39 >gi\|2062164 (AC001645) jasmonate inducible protein isolog |
| | | [Arabidopsis thaliana] Length = 470 |
| 506 | 2028506 | 1E-82 ) >sp\|P32962\|NRL2_ARATH NITRILASE 2 >gi\|322548\|pir∥S31969 |
| | | nitrilase (EC 3.5.5.1) - [Arabidopsis thaliana >gi\|22656\|emb\|CAA48377\| (X68305) |
| | | nitrilase II [Arabidopsis thaliana] >gi\|508733 (U09958) nitrilase [Arabidopsis |
| | | thaliana] Length = 339 |
| 507 | 2028507 | 3′ Pkc_Phospho_Site(41-43) |
| 508 | 2028508 | 3′ Pkc_Phospho_Site(11-13) |
| 509 | 2028509 | 3′ 1E-49 >gi\|6166038\|sp\|P48421\|CP83_ARATH CYTOCHROME P450 83A1 |
| | | (CYPLXXXIII) >gi\|2454176 (U69134) cytochrome P450 monooxygenase |
| | | [Arabidopsis thaliana] >gi\|3164128\|dbj\|BAA28532\| (D78599) cytochrome P450 |
| | | monooxygenase [Arabidopsis thaliana] >gi\|4455306\|emb\|CAB36841.1\| |
| | | (AL035528) cytochrome P450 monooxygenase (CYP83A1) [Arabidopsis thaliana] |
| | | Length = 502 |
| 510 | 2028510 | 3′ Tyr_Phospho_Site(289-296) |
| 511 | 2028511 | 3′ Pkc_Phospho_Site(165-167) |
| 512 | 2028512 | 5′ Pkc_Phospho_Site(52-54) |
| 513 | 2028513 | 5′ 2E-28 >gi\|5815233\|gb\|AAD52608.1\|AF173378_1 (AF173378) 60S acidic |
| | | ribosomal protein PO [Homo sapiens] Length = 239 |
| 514 | 2028514 | 5′ Tyr_Phospho_Site(127-135) |
| 515 | 2028515 | 9E-47 >emb\|CAA05629.1\| (AJ002597) membrane-associated salt-inducible |
| | | protein like [Arabidopsis thaliana] Length = 428 |
| 516 | 2028516 | Tyr_Phospho_Site(648-655) |
| 517 | 2028517 | 2E-14 >gb\|AAD17428\| (AC006284) methyltransferase [Arabidopsis |
| | | thaliana] Length = 619 |
| 518 | 2028518 | 6E-23 >dbj\|BAA18924\| (D61395) gamma-VPE [Arabidopsis thaliana] |
| | | Length = 490 |
| 519 | 2028519 | Pkc_Phospho_Site(79-81) |
| 520 | 2028520 | 2E-28 >sp\|P43601\|YFJ1_YEAST HYPOTHETICAL 55.1 KD PROTEIN IN |
| | | FAB1-PES4 INTERGENIC REGION >gi\|1084743\|pir∥S56276 probable |
| | | membrane protein YFR021w - yeast (Saccharomyces cerevisiae) |
| | | >gi\|836776\|dbj\|BAA09260.1\|(D50617) YFR021W [Saccharomyces cerevisiae] |
| | | Length = 500 |
| 521 | 2028521 | 3E-52 >sp\|P46523\|CLPA_BRANA ATP-DEPENDENT CLP PROTEASE ATP- |
| | | BINDING SUBUNIT CLPA PRECURSOR >gi\|480969\|pir∥S37557 c\|pA protein - |
| | | rape (fragment) >gi\|406311\|emb\|CAA53077\| (X75328) c\|pA [Brassica napus] |
| | | Length = 874 |
| 522 | 2028522 | Tyr_Phospho_Site(1092-1098) |
| 523 | 2028523 | Tyr_Phospho_Site(727-735) |
| 524 | 2028524 | 6E-64 >gb\|AAD30599.1\|AC007369_9 (AC007369) Similar to RNA helicases |
| | | [Arabidopsis thaliana] Length = 1166 |
| 525 | 2028525 | 1E-106 >pir∥S44943 sulfate adenylyltransferase (EC 2.7.7.4) - |
| | | Arabidopsis thaliana >gi\|2129743\|pir∥S68024 sulfate adenylyltransferase (EC |
| | | 2.7.7.4) precursor (clone APS2) - Arabidopsis thaliana |
| | | >gi\|487404\|emb\|CAA55799\| (X79210) sulfate adenylyltransferase [Arabidopsis |
| | | thaliana] >gi\|1228104 (U06276) ATP sulfurylase [Arabidopsis thaliana] |
| | | >gi\|1378028 (U40715) ATP sulfurylase precursor [Arabidopsis thaliana] |
| | | >gi\|1575324 (U59737) ATP sulfurylase [Arabidopsis thaliana] Length = 476 |
| 526 | 2028526 | Tyr_Phospho_Site(1807-1814) |
| 527 | 2028527 | 8E-59 >gi\|3249077 (AC004473) Similar to prunasin hydrolase precursor |
| | | gb\|U50201 from Prunus serotina. ESTs gb\|T21225 and gb\|AA586305 come from |
| | | this gene. [Arabidopsis thaliana] Length = 439 |
| 528 | 2028528 | 1E-69 >gb\|AAD49995.1\|AC007259_8 (AC007259) glucose transporter |
| | | [Arabidopsis thaliana] Length = 522 |
| 529 | 2028529 | 4E-75 >gb\|AAB63620.1\| (AC002343) trehalase precusor isolog |
| | | [Arabidopsis thaliana] Length = 557 |
| 530 | 2028530 | 2E-23 >gb\|AAD21456.1\| (AC007017) transcription factor E2F5 |
| | | [Arabidopsis thaliana] Length = 532 |
| 531 | 2028531 | Tyr_Phospho_Site(654-660) |
| 532 | 2028532 | 4E-26 >gi\|2494144 (AC002329) predicted leucine-rich protein |
| | | [Arabidopsis thaliana] Length = 526 |
| 533 | 2028533 | 1E-13 >emb\|CAA22523\| (AL034563) transcription initiation factor iif, beta |
| | | subunit [Schizosaccharomyces pombe] Length = 307 |
| 534 | 2028534 | 7E-12 >gb\|AAD27870.1\|AF134155_1 (AF134155) RING finger protein |
| | | [Arabidopsis thaliana] Length = 170 |
| 535 | 2028535 | Tyr_Phospho_Site(557-564) |
| 536 | 2028536 | 3′ Pkc_Phospho_Site(66-68) |
| 537 | 2028537 | 3′ 4E-17 >gi\|2244792\|emb\|CAB10215.1\| (Z97336) ankyrin like protein |
| | | [Arabidopsis thaliana] Length = 936 |
| 538 | 2028538 | 3′ Pkc_Phospho_Site(74-76) |
| 539 | 2028539 | 3′ Tyr_Phospho_Site(738-746) |
| 540 | 2028540 | 3′ Pkc_Phospho_Site(78-80) |
| 541 | 2028541 | 3′ Pkc_Phospho_Site(80-82) |
| 542 | 2028542 | 5′ 2E-66 >gi\|2459443 (AC002332) NAD(P)-dependent cholesterol |
| | | dehydrogenase [Arabidopsis thaliana] Length = 480 |
| 543 | 2028543 | 5′ Tyr_Phospho_Site(543-551) |
| 544 | 2028544 | 5′ Tyr_Phospho_Site(245-252) |
| 545 | 2028545 | 5′ Pkc_Phospho_Site(1-3) |
| 546 | 2028546 | 5′ 6E-69 >gi\|4538926\|emb\|CAB39662.1\| (AL049483) phosphatidylserine |
| | | decarboxylase [Arabidopsis thaliana] Length = 628 |
| 547 | 2028547 | 5′ 3E-22 >gi\|1931650 (U95973) disease resistance protein RPM1 |
| | | isolog [Arabidopsis thaliana] Length = 821 |
| 548 | 2028548 | 1E-168 >emb\|CAB52174.1\| (AJ245407) syntaxin protein [Arabidopsis |
| | | thaliana] Length = 341 |
| 549 | 2028549 | Pkc Phospho_Site(20-22) |
| 550 | 2028550 | 3E-51 >gb\|AAD50003.1\|AC0072599_16 (AC007259) Unknown protein |
| | | [Arabidopsis thaliana] Length = 308 |
| 551 | 2028551 | 4E-53 >emb\|CAB51834.1\| (AJ243961) contains eukaryotic protein kinase |
| | | domain PF\|00069 [Oryza sativa] Length = 844 |
| 552 | 2028552 | 1E-62 >pir∥S58494 IAA7 protein - Arabidopsis thaliana >gi\|972917 |
| | | (U18409) IAA7 [Arabidopsis thaliana] Length = 243 |
| 553 | 2028553 | Pkc_Phospho_Site(14-16) |
| 554 | 2028554 | Tyr_Phospho_Site(164-171) |
| 555 | 2028555 | Pkc_Phospho_Site(31-33) |
| 556 | 2028556 | 6E-33 >emb\|CAB5528l.1\| (AL117212)WD domian, G-beta repeat protein |
| | | [Schizosaccharomyces pombe] Length = 608 |
| 557 | 2028557 | 5E-98 ) >sp\|O24496\|GL2C_ARATH HYDROXYACYLGLUTATHIONE |
| | | HYDROLASE CYTOPLASMIC (GLYOXALASE II) (GLX II) |
| | | >gi\|1924921\|emb\|CAA69644\| (Y08357) hydroxyacylglutathione hydrolase |
| | | [Arabidopsis thaliana] Length = 258 |
| 558 | 2028558 | Pkc_Phospho_Site(64-66) |
| 559 | 2028559 | Tyr_Phospho_Site(250-256) |
| 560 | 2028560 | 3′ Tyr_Phospho_Site(168-174) |
| 561 | 2028561 | 3′ 2E-15 >gi\|4539452\|emb\|CAB39932.1\| (AL049500) |
| | | phosphoribosylanthranilate transferase [Arabidopsis thaliana] Length = 857 |
| 562 | 2028562 | 3′ 2E-19 >gi\|2894378\|emb\|CAA74910.1\| (Y14573) ribophorin I homologue |
| | | [Hordeum vulgare] Length = 473 |
| 563 | 2028563 | 3′ Pkc_Phospho_Site(39-41) |
| 564 | 2028564 | 3′ 4E-16 >gi\|3913894\|sp\|O67825\|IF2_AQUAE TRANSLATION INITIATION |
| | | FACTOR IF-2 >gi\|2984268 (AE000769) initiation factor IF-2 [Aquifex aeolicus] |
| | | Length = 805 |
| 565 | 2028565 | 5′ Pkc_Phospho_Site(231-233) |
| 566 | 2028566 | 5′ Pkc_Phospho_Site(4-6) |
| 567 | 2028567 | 5′ Tyr_Phospho_Site(17-24) |
| 568 | 2028568 | 1E-60 ) >gi\|2281109 (AC002333) endochitinase isolog [Arabidopsis |
| | | thaliana] Length = 281 |
| 569 | 2028569 | Pkc_Phospho_Site(61-63) |
| 570 | 2028570 | 3E-19 >sp\|P33174\|KIF4_MOUSE KINESIN-LIKE PROTEIN KIF4 |
| | | >gi\|1083417\|pir∥A54803 microtubule-associated motor KIF4 - mouse |
| | | >gi\|563773\|dbj\|BAA021671 (D12646) KIF4 [Mus musculus] Length = 1231 |
| 571 | 2028571 | 6E-70 >gi\|3367517 (AC004392) Similar to F4I1.26 beta-glucosidase |
| | | gi\|3128187 from A. thaliana BAC gb\|AC004521. ESTs gb\|N97083, gb\|F19868 |
| | | and gb\|F15482 come from this gene. [Arabidopsis thaliana] Length = 527 |
| 572 | 2028572 | Tyr_Phospho_Site(165-173) |
| 573 | 2028573 | Tyr_Phospho_Site(162-169) |
| 574 | 2028574 | 4E-12 >emb\|CAB38825.1\| (AL035679) kinesin like protein [Arabidopsis |
| | | thaliana] Length = 1121 |
| 575 | 2028575 | 9E-84 >gi\|1931645 (U95973) Fe(II) transporter isolog [Arabidopsis |
| | | thaliana] Length = 374 |
| 576 | 2028576 | Tyr_Phospho_Site(299-305) |
| 577 | 2028577 | 2E-66 >sp\|O65355\|GGH_ARATH GAMMA-GLUTAMYL HYDROLASE |
| | | PRECURSOR (GAMMA-GLU-X CARBOXYPEPTIDASE) (CONJUGASE) (GH) |
| | | >gi\|3169656 (AF067141) gamma-glutamyl hydrolase [Arabidopsis thaliana] |
| | | Length = 326 |
| 578 | 2028578 | 1E-39 >emb\|CAB38294\| (AL035605) formamidase-like protein |
| | | [Arabidopsis thaliana] Length = 432 |
| 579 | 2028579 | 3′ 3E-34 >gi\|1707008 (U78721) 30S ribosomal protein S5 isolog |
| | | [Arabidopsis thaliana] Length = 303 |
| 580 | 2028580 | 3′ Rgd(732-734) |
| 581 | 2028581 | 3′ Pkc_Phospho_Site(28-30) |
| 582 | 2028582 | 5′ 9E-21 >gi\|4263791\|gb\|AAD15451\| (AC006068) receptor protein kinase |
| | | [Arabidopsis thaliana] Length = 567 |
| 583 | 2028583 | Tyr_Phospho_Site(710-718) |
| 584 | 2028584 | Tyr_Phospho_Site(632-638) |
| 585 | 2028585 | Pkc_Phospho_Site(77-79) |
| 586 | 2028586 | 1E-63 >emb\|CAA11285.1\| (AJ223384) 26S proteasome regulatory ATPase |
| | | subunit 10b (S10b) [Manduca sexta] Length = 396 |
| 587 | 2028587 | Pkc_Phospho_Site(5-7) |
| 588 | 2028588 | Rgd(395-397) |
| 589 | 2028589 | 2E-23 >gi\|2149380 (U85036) syntaxin homolog [Arabidopsis thaliana] |
| | | >gi\|5281026\|emb\|CAB10553.2\| (Z97344) syntaxin [Arabidopsis thaliana] Length = |
| | | 255 |
| 590 | 2028590 | Tyr_Phospho_Site(493-501) |
| 591 | 2028591 | Pkc_Phospho_Site(173-175) |
| 592 | 2028592 | 8E-24 >emb\|CAB07030\| (Z92770) fadE2 [Mycobacterium tuberculosis] |
| | | Length = 403 |
| 593 | 2028593 | 6E-25 >gi\|3328893 (AE001320) Peptide Chain Release Factor 2 |
| | | [Chlamydia trachomatis] Length = 369 |
| 594 | 2028594 | Tyr_Phospho_Site(153-160) |
| 595 | 2028595 | Tyr_Phospho_Site(115-121) |
| 596 | 2028596 | Tyr_Phospho_Site(448-455) |
| 597 | 2028597 | Pkc_Phospho_Site(30-32) |
| 598 | 2028598 | Rgd(459-461) |
| 599 | 2028599 | 3′ 5E-21 >gi\|1732517 (U62745) cytoskeletal protein [Arabidopsis |
| | | thaliana] Length = 782 |
| 600 | 2028600 | 3′ Pkc_Phospho_Site(330-332) |
| 601 | 2028601 | 3′ 8E-62 >gi\|4097505 (U63020) D1 protein [Magnolia pyramidata] |
| | | Length = 353 |
| 602 | 2028602 | 3′ Tyr_Phospho_Site(118-126) |
| 603 | 2028603 | 3′ Pkc_Phospho_Site(36-38) |
| 604 | 2028604 | 5′ Tyr_Phospho_Site(720-727) |
| 605 | 2028605 | 5′ 2E-59 >gi\|499301\|emb\|CAA54383\| (X77116) ABI1 [Arabidopsis thaliana] |
| | | >gi\|549981 (U12856) abscisic acid insensitive protein [Arabidopsis thaliana] |
| | | >gi\|4538937\|emb\|CAB39673.1\| (AL049483) protein phosphatase ABI1 |
| | | [Arabidopsis thaliana] Length = 434 |
| 606 | 2028606 | 5′ 6E-50 >gi\|1709786\|sp\|P54904\|PROC_ARATH PYRROLINE-5- |
| | | CARBOXYLATE REDUCTASE (P5CR) (PSC REDUCTASE) |
| | | >gi\|541894\|pir∥JQ2334 pyrroline-5-carboxylate reductase (EC 1.5.1.2) - |
| | | Arabidopsis thaliana >gi\|166815 (M76538) pyrroline carboxylate reductase |
| | | [Arabidopsis thaliana] >gi\|1632776\|emb\|CAA701481 |
| 607 | 2028607 | 5′ Pkc_Phospho_Site(33-35) |
| 608 | 2028608 | 1E-48 >gb\|AAD10854.1\| (U60135) serine/threonine protein phosphatase |
| | | 2A-3 catalytic subunit [Arabidopsis thaliana] Length = 352 |
| 609 | 2028609 | Pkc_Phospho_Site(56-58) |
| 610 | 2028610 | Tyr_Phospho_Site(62-68) |
| 611 | 2028611 | 3E-17 >emb\|CAB52561.1\| (AL109819) stromal ascorbate peroxidase |
| | | [Arabidopsis thaliana] Length = 372 |
| 612 | 2028612 | 8E-51 ) >gi\|3421077 (AF043521) 20S proteasome subunit PAC1 |
| | | [Arabidopsis thaliana] Length = 250 |
| 613 | 2028613 | 1E-82 >gi\|3341695 (AC003672) thiamin pyrophosphokinase |
| | | [Arabidopsis thaliana] Length = 263 |
| 614 | 2028614 | Pkc_Phospho_Site(2-4) |
| 615 | 2028615 | 1E-47 >emb\|CAA18212.1\| (AL022198) SERINE CARBOXYPEPTIDASE II- |
| | | like protein [Arabidopsis thaliana] Length = 425 |
| 616 | 2028616 | Pkc_Phospho_Site(55-57) |
| 617 | 2028617 | Pkc_Phospho_Site(15-17) |
| 618 | 2028618 | 3E-27 >sp\|P49691\|RL4_ARATH 60S RIBOSOMAL PROTEIN L4 (L1) Length |
| | | = 404 |
| 619 | 2028619 | Pkc_Phospho_Site(42-44) |
| 620 | 2028620 | 5E-27 >gi\|3252815 (AC004705) vacuolar sorting receptor-like protein |
| | | [Arabidopsis thaliana] >gi\|3810588 (AC005398) vacuolar sorting receptor-like |
| | | protein [Arabidopsis thaliana] Length = 628 |
| 621 | 2028621 | 2E-43 >emb\|CAA23023.1\| (AL035394) phosphatase like protein |
| | | [Arabidopsis thaliana] Length = 350 |
| 622 | 2028622 | 3′ Pkc_Phospho_Site(55-57) |
| 623 | 2028623 | 5′ Pkc_Phospho_Site(4-6) |
| 624 | 2028624 | 5′ Pkc_Phospho_Site(9-11) |
| 625 | 2028625 | 5′ Tyr_Phospho_Site(35-41) |
| 626 | 2028626 | 4E-34 >gi\|3859659\|emb\|CAA20566.1\| (AL031394) potassium transporter |
| | | AtKT5p (AtKT5) [Arabidopsis thaliana] Length = 846 |
| 627 | 2028627 | 5′ 3E-74 >gi\|585421\|sp\|P38418\|LOXC_ARATH LIPOXYGENASE, |
| | | CHLOROPLAST PRECURSOR >gi\|541879\|pir∥JQ2391 lipoxygenase (EC |
| | | 1.13.11.12) AtLox2 - [Arabidopsis thaliana >gi\|431258 (L23968) lipoxygenase |
| | | [Arabidopsis thaliana] Length = 896 |
| 628 | 2028628 | Tyr_Phospho_Site(35-41) |
| 629 | 2028629 | 2E-29 >gi\|2621798 (AE000850) transcriptional regulator |
| | | [Methanobacterium thermoautotrophicum] Length = 151 |
| 630 | 2028630 | 2E-53 >gi\|1181531 (L41244) thionin [Arabidopsis thaliana] |
| | | >gi\|1586833\|prf∥2204399A thionin [Arabidopsis thaliana] Length = 134 |
| 631 | 2028631 | 2E-34 >gb\|AAC69619.1\| (AF072736) beta-glucosidase [Pinus contorta] |
| | | Length = 513 |
| 632 | 2028632 | 7E-32 >gi\|3599491 (AF085149) aminotransferase [Capsicum chinense] |
| | | Length = 459 |
| 633 | 2028633 | Pkc_Phospho_Site(39-41) |
| 634 | 2028634 | Pkc_Phospho_Site(23-25) |
| 635 | 2028635 | Tyr_Phospho_Site(92-99) |
| 636 | 2028636 | 1E-82 >emb\|CAA11525.1\| (AJ223635) transcription factor IIA large subunit |
| | | [Arabidopsis thaliana] Length = 375 |
| 637 | 2028637 | 7E-27 >pir∥S30578 proteinase inhibitor II - Arabidopsis thaliana |
| | | >gi\|16427\|emb\|CAA48892\| (X69139) protease inhibitor II [Arabidopsis thaliana] |
| | | >gi\|4038041 (AC005936) proteinase inhibitor II [Arabidopsis thaliana] Length = 77 |
| 638 | 2028638 | 2E-68 >dbj\|BAA19751\| (D85339) hydroxypyruvate reductase [Arabidopsis |
| | | thaliana] Length = 386 |
| 639 | 2028639 | 7E-12 >sp\|O07051\|LTAA_AERJA L-ALLO-THREONINE ALDOLASE (L- |
| | | ALLO-TA) (L-ALLO-THREONINE ACETALDEHYDE-LYASE) |
| | | >gi\|2190272\|dbj\|BAA20404\| (D87890) L-allo-threonine aldolase [Aeromonas |
| | | jandaei] Length = 338 |
| 640 | 2028640 | 1E-12 >gi\|3193298 (AF069298)T14P8.17 gene product [Arabidopsis |
| | | thaliana] Length = 154 |
| 641 | 2028641 | Tyr_Phospho_Site(213-220) |
| 642 | 2028642 | 4E-25 >sp\|O49972\|DCA2_BRAJU S-ADENOSYLMETHIONINE |
| | | DECARBOXYLASE PROENZYME 2 (ADOMETDC 2) (SAMDC 2) >gi\|2662406 |
| | | (U80916) S-adenosyl-L-methionine decarboxylase [Brassica juncea] Length = |
| | | 369 |
| 643 | 2028643 | 3′ 2E-13 >gi\|2641638 (AF032883) AtJ3 [Arabidopsis thaliana] Length = |
| | | 420 |
| 644 | 2028644 | 3′ Tyr_Phospho_Site(296-303) |
| 645 | 2028645 | 5′ Tyr_Phospho_Site(29-36) |
| 646 | 2028646 | 5′ 1E-73 >gi\|5902365\|gb\|AAD55467.1\|AC009322_7 (AC009322) splicing |
| | | factor Prp8 [Arabidopsis thaliana] Length = 2359 |
| 647 | 2028647 | 5′ 6E-37 >gi\|1542941\|emb\|CAA55006\| (X78116) Acetoacetyl-coenzyme A |
| | | thiolase [Raphanus sativus] Length = 406 |
| 648 | 2028648 | Rgd(383-385) |
| 649 | 2028649 | 4E-61 >gb\|AAD45605.1\|AF160729_1 (AF160729) isovaleryl-CoA- |
| | | dehydrogenase precursor [Arabidopsis thaliana] Length = 409 |
| 650 | 2028650 | Tyr_Phospho_Site(1078-1085) |
| 651 | 2028651 | 1E-105 >emb\|CAA16684\| (AL021684) oxoglutarate dehydrogenase - like |
| | | protein [Arabidopsis thaliana] Length = 973 |
| 652 | 2028652 | 2E-52 >sp\|Q45223\|HBD_BRAJA 3-HYDROXYBUTYRYL-COA |
| | | DEHYDROGENASE (BETA-HYDROXYBUTYRYL-COA DEHYDROGENASE) |
| | | (BHBD) >gi\|1209052 (U32229) HbdA [Bradyrhizobium japonicum] Length = 293 |
| 653 | 2028653 | Tyr_Phospho_Site(711-719) |
| 654 | 2028654 | 9E-24 >gi\|3738320 (AC005170) cinnamoyl CoA reductase [Arabidopsis |
| | | thaliana] Length = 303 |
| 655 | 2028655 | 3E-67 ) >gi\|2952433 (AF051135) ubiquitin activating enzyme E1 |
| | | [Arabidopsis thaliana] Length = 454 |
| 656 | 2028656 | Pkc_Phospho_Site(31-33) |
| 657 | 2028657 | Tonb_Dependent_Rec_1(1-75) |
| 658 | 2028658 | 8E-87 >sp\|P49661\|COPD_ORYSA COATOMER DELTA SUBUNIT (DELTA- |
| | | COAT PROTEIN) (DELTA-COP) (ARCHAIN) >gi\|1314049\|emb\|CAA91901\| |
| | | (Z67962) archain\|delta-COP [Oryza sativa] Length = 518 |
| 659 | 2028659 | 9E-40 >dbj\|BAA84386.1\| (AP000423) ycf3 [Arabidopsis thaliana] Length = |
| | | 126 |
| 660 | 2028660 | 3′ Pkc_Phospho_Site(8-10) |
| 661 | 2028661 | 3′ Pkc_Phospho_Site(123-125) |
| 662 | 2028662 | 5′ Zinc_Finger_C2h2(63-85) |
| 663 | 2028663 | 5′ Tyr_Phospho_Site(544-551) |
| 664 | 2028664 | 5′ 2E-54 >gi\|2129727\|pir∥S71229 RNA-binding protein 37 - Arabidopsis |
| | | thaliana >gi\|1174153 (U44134) RNA-binding protein [Arabidopsis thaliana] Length = |
| | | 336 |
| 665 | 2028665 | Tyr_Phospho_Site(383-390) |
| 666 | 2028666 | 1E-51 >emb\|CAA17552\| (AL021961) Phosphoglycerate dehydrogenase - |
| | | like protein [Arabidopsis thaliana] Length = 603 |
| 667 | 2028667 | Tyr_Phospho_Site(371-378) |
| 668 | 2028668 | Pkc_Phospho_Site(25-27) |
| 669 | 2028669 | Pkc_Phospho_Site(14-16) |
| 670 | 2028670 | 3E-29 >gi\|4155557 (AE001526) CYCLOPOCYCLOPROPANE FATTY |
| | | ACID SYNTHASE [Helicobacter pylori J99] Length = 389 |
| 671 | 2028671 | 2E-79 >emb\|CAA09208\| (AJ010469) RNA helicase [Arabidopsis thaliana] |
| | | Length = 360 |
| 672 | 2028672 | Tyr_Phospho_Site(319-325) |
| 673 | 2028673 | 1E-113 >gb\|AAD55787.1\|AF181966_1 (AF181966) methylenetetrahydrofolate |
| | | reductase MTHFR1 [Arabidopsis thaliana] Length = 592 |
| 674 | 2028674 | Tyr_Phospho_Site(1157-1163) |
| 675 | 2028675 | 3E-69 ) >gi\|3421090 (AF043525) 20S proteasome subunit PAE2 |
| | | [Arabidopsis thaliana] Length = 237 |
| 676 | 2028676 | 1E-56 >gi\|4063738 (AC005851) zinc finger protein [Arabidopsis |
| | | thaliana] >gi\|4803961\|gb\|AAD29833.1\|AC006202_11 (AC006202) unknown |
| | | protein [Arabidopsis thaliana] Length = 284 |
| 677 | 2028677 | Pkc_Phospho_Site(22-24) |
| 678 | 2028678 | Tyr_Phospho_Site(174-180) |
| 679 | 2028679 | 4E-43 >emb\|CAA47807\| (X67421) extA [Arabidopsis thaliana] Length = |
| | | 127 |
| 680 | 2028680 | 3′ Tyr_Phospho_Site(195-202) |
| 681 | 2028681 | 3′ 4E-14 >gi\|120532\|sp\|P19976\|FRI_SOYBN FERRITIN PRECURSOR (SOF- |
| | | 35) >gi\|81773\|pir∥A40992 ferritin precursor - soybean >gi\|169953 (M64337) |
| | | ferritin light chain [Glycine max] Length = 250 |
| 682 | 2028682 | 3′ Rgd(36-38) |
| 683 | 2028683 | 3′ 4E-35 >gi\|3047064 (AF058825) contains similarity to peptidyl-prolyl |
| | | cis-trans isomerase (Pfam: pro_isomerase.hmm, score: 23.86 and 28.41 |
| | | [Arabidopsis thaliana] Length = 281 |
| 684 | 2028684 | 3′ Pkc_Phospho_Site(11-13) |
| 685 | 2028685 | 5′ Pkc_Phospho_Site(47-49) |
| 686 | 2028686 | 5′ 2E-19 >gi\|6322411\|ref\|NP_012485.1\|MTR4\| RNA helicase; Mtr4p |
| | | >gi\|1352980\|sp\|P47047\|MTR4_YEAST ATP-DEPENDENT RNA HELICASE |
| | | DOB1 (MRNA TRANSPORT REGULATOR MTR4) >gi\|1078374\|pir∥S56822 SKI2 |
| | | protein homolog YJL050w - yeast (Saccharomyces cerevisiae) |
| | | >gi\|1008185\|emb\|CAA89341\| (Z49325) ORF YJL050w |
| 687 | 2028687 | 5′ Tyr_Phospho_Site(622-629) |
| 688 | 2028688 | 5′ Rgd(156-158) |
| 689 | 2028689 | Pkc_Phospho_Site(29-31) |
| 690 | 2028690 | Tyr_Phospho_Site(350-356) |
| 691 | 2028691 | 1E-14 >gi\|3834312 (AC005679) Strong similarity to glycoprotein EP1 |
| | | gb\|L16983 Daucus carota and a member of S locus glycoprotein family |
| | | PF\|00954. ESTs gb\|AA067487, gb\|Z35737, gb\|Z30815, gb\|Z35350, |
| | | gb\|AA713171, gb\|AI100553, gb\|Z34248, gb\|AA728536, gb\|Z30816 an . . . Length |
| 692 | 2028692 | Pkc_Phospho_Site(2-4) |
| 693 | 2028693 | 6E-28 >gi\|4102703 (AF015274) ribulose-5-phosphate-3-epimerase |
| | | [Arabidopsis thaliana] Length = 281 |
| 694 | 2028694 | Tyr_Phospho_Site(295-303) |
| 695 | 2028695 | Tyr_Phospho_Site(790-796) |
| 696 | 2028696 | Tyr_Phospho_Site(151-158) |
| 697 | 2028697 | Pkc_Phospho_Site(26-28) |
| 698 | 2028698 | 1E-59 >emb\|CAA74372\| (Y14044) geranylgeranyl reductase [Arabidopsis |
| | | thaliana] Length = 472 |
| 699 | 2028699 | Tyr_Phospho_Site(823-830) |
| 700 | 2028700 | Tyr_Phospho_Site(159-166) |
| 701 | 2028701 | 2E-13 >gi\|4249409 (AC006072) sugar transporter [Arabidopsis |
| | | thaliana] Length = 348 |
| 702 | 2028702 | 8E-76 >emb\|CAB38611.1\| (AL035656) extensin-like protein ([Arabidopsis |
| | | thaliana] Length = 448 |
| 703 | 2028703 | 6E-83 ) >sp\|P29513\|TBB5_ARATH TUBULIN BETA-5 CHAIN |
| | | >gi\|320186\|pir∥JQ1589 tubulin beta-5 chain - [Arabidopsis thaliana >gi\|166902 |
| | | (M84702) beta-5 tubulin [Arabidopsis thaliana] Length = 449 |
| 704 | 2028704 | 3′ Tyr_Phospho_Site(418-424) |
| 705 | 2028705 | 3′ 4E-39 >gi\|4103987 (AF030516) 5,10-methylenetetrahydrofolate |
| | | dehydrogenase-5, 10-methenyltetrahydrofolate cyclohydrolase [Pisum sativum] |
| | | >gi\|6002383\|emb\|CAB56756.1\| (AJ011589) 5,10-methylenetetrahydrofolate |
| | | dehydrogenase: 5,10-methenyltetrahydrofolate cyclohydrolase [Pisum sativum] |
| | | Length = 294 |
| 706 | 2028706 | 3′ Tyr_Phospho_Site(470-478) |
| 707 | 2028707 | 5′ Pkc_Phospho_Site(35-37) |
| 708 | 2028708 | 5′ Pkc_Phospho_Site(18-20) |
| 709 | 2028709 | 5′ Pkc_Phospho_Site(236-238) |
| 710 | 2028710 | 5′ Pkc_Phospho_Site(7-9) |
| 711 | 2028711 | 5′ 6E-43 >gi\|6006879\|gb\|AAF00654.1\|AC008153_6 (AC008153) eukaryotic |
| | | translation initiation factor 3 subunit [Arabidopsis thaliana] Length = 294 |
| 712 | 2028712 | 5′ 2E-61 >gi\|1750376 (U80808) ubiquitin activating enzyme |
| | | [Arabidopsis thaliana] >gi\|3150409 (AC004165) ubiquitin activating enzyme |
| | | (UBA1) [Arabidopsis thaliana] Length = 1080 |
| 713 | 2028713 | 5′ Tyr_Phospho_Site(141-148) |
| 714 | 2028714 | 5′ Pkc_Phospho_Site(186-188) |
| 715 | 2028715 | 5′ 3E-29 >gi\|3914191\|sp\|P56558\|OGT1_RAT UDP-N- |
| | | ACETYLGLUCOSAMINE-PEPTIDE N- |
| | | ACETYLGLUCOSAMINYLTRANSFERASE 110 KD SUBUNIT (O-GLCNAC |
| | | TRANSFERASE P110 SUBUNIT) >gi\|1931579 (U76557) O-GlcNAc transferase, |
| | | p110 subunit [Rattus norvegicus] Length = 1036 |
| 716 | 2028716 | 5′ 3E-71 >gi\|5931694\|emb\|CAB56597.1\| (Y18470) Exportin1 (XPO1) protein |
| | | [Arabidopsis thaliana] Length = 1075 |
| 717 | 2028717 | Tyr_Phospho_Site(450-458) |
| 718 | 2028718 | 5E-43 >pir∥S58118 thioredoxin - Arabidopsis thaliana |
| | | >gi\|992962\|emb\|CAA84611\| (Z35474) thioredoxin [Arabidopsis thaliana] |
| | | >gi\|1388076 (U35640) thioredoxin h [Arabidopsis thaliana] Length = 118 |
| 719 | 2028719 | 9E-45 >gi\|3287677 (AC003979) Contains similarity to transcription |
| | | factor (TINY) isolog T02O04.22 gb\|2062174 from A. thaliana BAC gb\|AC001645. |
| | | [Arabidopsis thaliana] Length = 144 |
| 720 | 2028720 | 2E-11 >emb\|CAB45279.1\| (AL079313) hypothetical protein, similar to |
| | | (M97204) goliath protein [Drosophila melanogaster] [Homo sapiens] Length = 104 |
| 721 | 2028721 | 1E-94 >gb\|AAD20931\| (AC006234) diacylglycerol kinase [Arabidopsis |
| | | thaliana] Length = 493 |
| 722 | 2028722 | Tyr_Phospho_Site(688-695) |
| 723 | 2028723 | Pkc_Phospho_Site(45-47) |
| 724 | 2028724 | Tyr_Phospho_Site(303-311) |
| 725 | 2028725 | 1E-178 >gi\|4220485 (AC006069) beta-1,3-glucanase [Arabidopsis |
| | | thaliana] Length = 439 |
| 726 | 2028726 | 2E-32 >sp\|P34124\|PRS8_DICDI 26S PROTEASE REGULATORY SUBUNIT |
| | | 8 (TAT-BINDING PROTEIN HOMOLOG 10) >gi\|422297\|pir∥JN0610 probable |
| | | transcription factor DdTBP10 - slime mold (Dictyostelium discoideum) (fragment) |
| | | >gi\|290057 (L16579) HIV1 TAT-binding protein [Dictyostelium discoideum] |
| | | Length = 389 |
| 727 | 2028727 | 7E-86 >gb\|AAD25787.1\|AC006577_23 (AC006577) Similar to gi\|1653162 |
| | | (p)ppGpp 3-pyrophosphohydrolase from Synechocystis sp genome gb\|D90911. |
| | | EST gb\|W43807 comes from this gene. [Arabidopsis thaliana] Length = 715 |
| 728 | 2028728 | 3E-13 >gi\|3420745 (AF079445) TipC [Dictyostelium discoideum] Length = |
| | | 3848 |
| 729 | 2028729 | 3′ 2E-16 >gi\|4538906\|emb\|CAB39643.1\| (AL049482) choline kinase GmCK2p- |
| | | like protein [Arabidopsis thaliana] Length = 346 |
| 730 | 2028730 | 3′ Pkc_Phospho_Site(64-66) |
| 731 | 2028731 | 3′ Pkc_Phospho_Site(114-116) |
| 732 | 2028732 | 3′ Tyr_Phospho_Site(227-234) |
| 733 | 2028733 | 3′ Rgd(568-570) |
| 734 | 2028734 | 3′ Tyr_Phospho_Site(13-20) |
| 735 | 2028735 | 3′ Tyr_Phospho_Site(172-180) |
| 736 | 2028736 | 5′ 4E-64 >gi\|2129613\|pir∥A57632 homeotic protein BEL1 - Arabidopsis |
| | | thaliana >gi\|1122533 (U39944) BELL1 [Arabidopsis thaliana] Length = 610 |
| 737 | 2028737 | 5′ 2E-21 >gi\|3912917\|gb\|AAC78693.1\| (AF001308) NAK-like ser/thr protein |
| | | kinase [Arabidopsis thaliana] Length = 707 |
| 738 | 2028738 | 5′ Pkc_Phospho_Site(3-5) |
| 739 | 2028739 | 5′ Tyr_Phospho_Site(301-309) |
| 740 | 2028740 | Pkc_Phospho_Site(69-71) |
| 741 | 2028741 | Pkc_Phospho_Site(38-40) |
| 742 | 2028742 | Tyr_Phospho_Site(478-485) |
| 743 | 2028743 | Pkc_Phospho_Site(2-4) |
| 744 | 2028744 | 1E-31 >emb\|CAA16524.1\| (AL021633) DNA topoisomerase like-protein |
| | | [Arabidopsis thaliana] Length = 1179 |
| 745 | 2028745 | 1E-71 ) >gi\|2347191 (AC002338) DNA binding protein isolog |
| | | [Arabidopsis thaliana] >gi\|3150397 (AC004165) DNA-binding protein |
| | | [Arabidopsis thaliana] Length = 393 |
| 746 | 2028746 | 2E-80 >gi\|3377808 (AF075597) contains similarity to Nicotiana alata |
| | | pistil extensin-like protein (GB:U45958) [Arabidopsis thaliana] Length = 165 |
| 747 | 2028747 | 1E-33 >sp\|P54888\|P5C2_ARATH DELTA 1-PYRROLINE-5-CARBOXYLATE |
| | | SYNTHETASE B (P5CS B) [INCLUDES: GLUTAMATE 5-KINASE (GAMMA- |
| | | GLUTAMYL KINASE) (GK); GAMMA-GLUTAMYL PHOSPHATE REDUCTASE |
| | | (GPR) (GLUTAMATE-5-SEMIALDEHYDE DEHYDROGENASE) (GLUTAMYL- |
| | | GAMMA-SEMIALDE . . . >gi\|887388\|emb\|CAA60447\| (X86778) pyrroline-5- |
| | | carboxylate synthetase B [Arabidopsis thaliana] >gi\|1669658\|emb\|CAA70527\| |
| | | (Y09355) pyrroline-5-carboxlyate synthetase [Arabidopsis thaliana] Length = 726 |
| 748 | 2028748 | 2E-54 >emb\|CAB45881.1\| (AL080282) berberine bridge enzyme-like |
| | | protein [Arabidopsis thaliana] Length = 530 |
| 749 | 2028749 | 5E-47 >gb\|AAD39281.1\|AC007576_4 (AC007576) initiation factor 5A-4 |
| | | [Arabidopsis thaliana] Length = 158 |
| 750 | 2028750 | 3E-43 >gi\|3941522 (AF062915) transcription factor [Arabidopsis |
| | | thaliana] Length = 249 |
| 751 | 2028751 | 8E-19 >emb\|CAB10269.1\| (Z97337) hydroxyproline-rich glycoprotein |
| | | homolog [Arabidopsis thaliana] Length = 507 |
| 752 | 2028752 | Tyr_Phospho_Site(757-764) |
| 753 | 2028753 | Tyr_Phospho_Site(316-322) |
| 754 | 2028754 | 3′ Tyr_Phospho_Site(427-434) |
| 755 | 2028755 | 3′ Tyr_Phospho_Site(730-738) |
| 756 | 2028756 | 3′ 8E-32 >gi\|1076534\|pir∥A55333 monodehydroascorbate reductase (NADH) |
| | | (EC 1.6.5.4) - garden pea >gi\|497120 (U06461) monodehydroascorbate |
| | | reductase [Pisum sativum] Length = 433 |
| 757 | 2028757 | 5′ 1E-16 >gi\|3337095\|dbj\|BAA31843\| (AB016206) polygalacturonase inhibitor |
| | | (PGIP) [Citrus iyo] Length = 327 |
| 758 | 2028758 | 5′ 4E-42 >gi\|4586249\|emb\|CAB40990.1\| (AL049640) pollen surface protein |
| | | [Arabidopsis thaliana] Length = 403 |
| 759 | 2028759 | 5′ Pkc_Phospho_Site(5-7) |
| 760 | 2028760 | 5′ Tyr_Phospho_Site(560-566) |
| 761 | 2028761 | 2E-40 >emb\|CAA76178.1\| (Y16327) cyclic nucleotide-regulated ion |
| | | channel [Arabidopsis thaliana] Length = 716 |
| 762 | 2028762 | Tyr_Phospho_Site(178-185) |
| 763 | 2028763 | 7E-12 >dbj\|BAA13831\| (D89169) similar to Saccharomyces cerevisiae |
| | | SCD6 protein, SWISS-PROT Accession Number P45978 [Schizosaccharomyces |
| | | pombe] Length = 370 |
| 764 | 2028764 | Rgd(288-290) |
| 765 | 2028765 | Tyr_Phospho_Site(21-27) |
| 766 | 2028766 | Tyr_Phospho_Site(722-729) |
| 767 | 2028767 | Tyr_Phospho_Site(1033-1039) |
| 768 | 2028768 | Pkc_Phospho_Site(45-47) |
| 769 | 2028769 | 4E-95 >gi\|4090884 (AF025333) vesicle-associated membrane protein |
| | | 7B; synaptobrevin 7B [Arabidopsis thaliana] Length = 219 |
| 770 | 2028770 | 3E-82 >emb\|CAA10320\| (AJ131205) mitochondrial NAD-dependent |
| | | malate dehydrogenase [Arabidopsis thaliana] Length = 341 |
| 771 | 2028771 | Pkc_Phospho_Site(277-279) |
| 772 | 2028772 | Pkc_Phospho_Site(13-15) |
| 773 | 2028773 | Pkc_Phospho_Site(168-170) |
| 774 | 2028774 | 6E-39 >emb\|CAB55622.1\| (AJ011044) cysteine synthase [Arabidopsis |
| | | thaliana] Length = 176 |
| 775 | 2028775 | 1E-27 >pir∥S65071 cystatin - field mustard >gi\|762785 (L41355) |
| | | cysteine proteinase inhibitor [Brassica campestris] Length = 199 |
| 776 | 2028776 | 6E-62 >gi\|3201633 (AC004669) cell division protein [Arabidopsis |
| | | thaliana] Length = 695 |
| 777 | 2028777 | 5E-81 ) >sp\|P25069\|CAL2_ARATH CALMODULIN-2/3/5 |
| | | >gi\|99671\|pir∥S22503 calmodulin - Arabidopsis thaliana >gi\|1076437\|pir∥S53006 |
| | | calmodulin - leaf mustard >gi\|2146726\|pir∥S71513 calmodulin - Arabidopsis |
| | | thaliana >gi\|166651 (M38380) calmodulin-2 [Arabidopsis thaliana] >gi\|166653 |
| | | (M73711) calmodulin-3 [Arabidopsis thaliana] >gi\|474183\|emb\|CAA47690\| |
| | | (X67273) calmodulin [Arabidopsis thaliana] >gi\|497992 (U10150) calmodulin |
| | | [Brassica napus] >gi\|899058 (M88307) calmodulin [Brassica juncea] |
| | | >gi\|1183005\|dbj\|BAA08283\| (D45848) calmodulin [Arabidopsis thaliana] |
| | | >gi\|3402706 (AC004261) unknown protein [Arabidopsis thaliana] >gi\|3885333 |
| | | (AC005623) calmodulin [Arabidopsis thaliana] >gi\|228407\|prf∥1803520A |
| | | calmodulin 2 [Arabidopsis thaliana] Length = 149 |
| 778 | 2028778 | 1E-13 >emb\|CAA18500\| (AL022373) Myc-type transcription factor |
| | | [Arabidopsis thaliana] Length = 272 |
| 779 | 2028779 | 3′ Pkc_Phospho_Site(37-39) |
| 780 | 2028780 | 5′ Pkc_Phospho_Site(59-61) |
| 781 | 2028781 | Tyr_Phospho_Site(305-312) |
| 782 | 2028782 | Tyr_Phospho_Site(2-9) |
| 783 | 2028783 | Pkc_Phospho_Site(63-65) |
| 784 | 2028784 | Pkc_Phospho_Site(87-89) |
| 785 | 2028785 | Tyr_Phospho_Site(412-419) |
| 786 | 2028786 | 4E-39 >gb\|AAD46410.1\|AF096260_1 (AF096260) ER66 protein [Lycopersicon |
| | | esculentum] Length = 558 |
| 787 | 2028787 | Pkc_Phospho_Site(21-23) |
| 788 | 2028788 | Pkc_Phospho_Site(24-26) |
| 789 | 2028789 | Tyr_Phospho_Site(68-75) |
| 790 | 2028790 | 3′ 4E-27 >gi\|4678261\|emb\|CAB41122.1\| (AL049657) proteasome regulatory |
| | | subunit [Arabidopsis thaliana] Length = 406 |
| 791 | 2028791 | 3′ Pkc_Phospho_Site(129-131) |
| 792 | 2028792 | 5′ Tyr_Phospho_Site(6-12) |
| 793 | 2028793 | 5′ 9E-27 >gi\|4914387\|gb\|AAD32922.1\|AC007167_4 (AC007167) heat-shock |
| | | protein [Arabidopsis thaliana] Length = 780 |
| 794 | 2028794 | Serpin(210-220) |
| 795 | 2028795 | Tyr_Phospho_Site(327-334) |
| 796 | 2028796 | Pkc_Phospho_Site(35-37) |
| 797 | 2028797 | 1E-45 >gi\|4093155 (AF088281) phytochrome-associated protein 1 |
| | | [Arabidopsis thaliana] Length = 267 |
| 798 | 2028798 | 3E-51 >gb\|AAD25794.1\|AC006550_2 (AC006550) Similar to gb\|U51990 pre- |
| | | mRNA-splicing factor hPrp18 from Homo sapiens. ESTs gb\|T46391 and |
| | | gb\|AA721815 come from this gene. [Arabidopsis thaliana] Length = 420 |
| 799 | 2028799 | Pkc_Phospho_Site(11-13) |
| 800 | 2028800 | Tyr_Phospho_Site(202-209) |
| 801 | 2028801 | 3E-48 >emb\|CAB39679.1\| (AL049483) beta-galactosidase [Arabidopsis |
| | | thaliana] Length = 729 |
| 802 | 2028802 | 4E-47 >emb\|CAA18465.1\| (AL022347) serine/threonine kinase-like protein |
| | | [Arabidopsis thaliana] Length = 633 |
| 803 | 2028803 | 1E-74 >gi\|3044218 (AF057144) signal peptidase [Arabidopsis thaliana] |
| | | Length = 167 |
| 804 | 2028804 | Tyr_Phospho_Site(707-715) |
| 805 | 2028805 | Pkc_Phospho_Site(22-24) |
| 806 | 2028806 | Tyr_Phospho_Site(325-332) |
| 807 | 2028807 | 5E-65 >emb\|CAB16773.1\| (Z99707) Cu2+-transporting ATPase-like protein |
| | | [Arabidopsis thaliana] Length 819 |
| 808 | 2028808 | 8E-63 >gb\|AAD17333\| (AF125574) lysyl-tRNA synthetase; LysRS |
| | | [Arabidopsis thaliana] >gi\|6041823\|gb\|AAF02138.1\|AC009918_10 (AC009918) |
| | | lysyl-tRNA synthetase [Arabidopsis thaliana] Length = 626 |
| 809 | 2028809 | 2E-56 >gi\|2909781 (AF020288) MgATP-energized glutathione S- |
| | | conjugate pump [Arabidopsis thaliana] Length = 1623 |
| 810 | 2028810 | 3′ Tyr_Phospho_Site(749-756) |
| 811 | 2028811 | 3′ 2E-20 >gi\|1655424\|dbj\|BAA119441 (D83531) GDP dissociation inhibitor |
| | | [Arabidopsis thaliana] >gi\|3212878 (AC004005) GOP dissociation inhibitor |
| | | [Arabidopsis thaliana] Length = 445 |
| 812 | 2028812 | 3′ Tyr_Phospho_Site(244-251) |
| 813 | 2028813 | 3′ 6E-15 >gi\|4325346\|gb\|AAD17345.1\| (AF128393) similar to N- |
| | | ethylmaleimide sensitive fusion proteins; contains similarity to ATPases (Pfam: |
| | | PF00004, Score = 307.7, E = 1.4e-88n N = 1) [Arabidopsis thaliana] Length = 772 |
| 814 | 2028814 | 3′ Rgd(690-692) |
| 815 | 2028815 | 5′ 1E-33 >gi\|2905657 (AF047469) arsenite translocating ATPase |
| | | [Homo sapiens] Length = 348 |
| 816 | 2028816 | 5′ Tyr_Phospho_Site(417-424) |
| 817 | 2028817 | 5′ 5E-44 >gi\|5929906\|gb\|AAD56636.1\|AF162150_1 (AF162150_1) COP1 - |
| | | interacting protein CIP8 [Arabidopsis thaliana] Length = 334 |
| 818 | 2028818 | Tyr_Phospho_Site(654-662) |
| 819 | 2028819 | Tyr_Phospho_Site(556-564) |
| 820 | 2028820 | Pkc_Phospho_Site(13-15) |
| 821 | 2028821 | 4E-35 >sp\|P49688\|RS2_ARATH 40S RIBOSOMAL PROTEIN S2 |
| | | >gi\|2335095 (AC002339) 40S ribosomal protein S2 [Arabidopsis thaliana] Length = |
| | | 285 |
| 822 | 2028822 | 6E-23 >ref\|NP_004862.1\|PGOSR1\| golgi SNAP receptor complex member 1 |
| | | >gi\|4234774 (AF073926) cis-Golgi SNARE p28 [Homo sapiens] Length = 250 |
| 823 | 2028823 | Tyr_Phospho_Site(409-416) |
| 824 | 2028824 | Pkc_Phospho_Site(2-4) |
| 825 | 2028825 | 5E-66 ) >emb\|CAB16796.1\| (Z99707) MAP3K-like protein kinase |
| | | [Arabidopsis thaliana] Length = 799 |
| 826 | 2028826 | 7E-71 >emb\|CAB10557.1\| (Z97344) trehalose-6-phosphate synthase like |
| | | protein [Arabidopsis thaliana] Length = 865 |
| 827 | 2028827 | 1E-139 >gi\|2262167 (AC002329) cytosolic ribosomal protein S4 |
| | | [Arabidopsis thaliana] Length = 261 |
| 828 | 2028828 | 4E-12 >gi\|3327957 (AF060490) TLS-associated protein TASR-2 [Mus |
| | | musculus] .gi\|3327976 (AF067730) TLS-associated protein TASR-2 [Homo |
| | | sapiens] Length = 262 |
| 829 | 2028829 | 2E-30 >pir∥S59544 stress-induced protein OZI1 precursor - Arabidopsis |
| | | thaliana >gi\|790583 (U20347) mRNA corresponding to this gene accumulates in |
| | | response to ozone stress and pathogen (bacterial) infection; pathogenesis- |
| | | related protein [Arabidopsis thaliana] >gi\|2252869 (AF013294) No definition line |
| | | found [Arabidopsis thaliana] Length = 80 |
| 830 | 2028830 | 5E-47 >dbj\|BAA24694\| (D88206) protein kinase [Arabidopsis thaliana] |
| | | Length = 426 |
| 831 | 2028831 | Pkc_Phospho_Site(8-10) |
| 832 | 2028832 | Tyr_Phospho_Site(58-64) |
| 833 | 2028833 | 3′ 1E-14 >gi\|4027895 (AF049352) alpha-expansin precursor |
| | | [Nicotiana tabacum] Length = 257 |
| 834 | 2028834 | 5′ Tyr_Phospho_Site(166-173) |
| 835 | 2028835 | 5′ 8E-44 >gi\|484656\|pir∥JU0182 monodehydroascorbate reductase (NADH) |
| | | (EC 1.6.5.4) - cucumber >gi\|452165\|dbj\|BAA05408\| (026392) |
| | | monodehydroascorbate reductase [Cucumis sativus] Length = 434 |
| 836 | 2028836 | Tyr_Phospho_Site(419-426) |
| 837 | 2028837 | Tyr_Phospho_Site(579-585) |
| 838 | 2028838 | 3E-32 >sp\|Q45223\|HBD_BRAJA 3-HYDROXYBUTYRYL-COA |
| | | DEHYDROGENASE (BETA-HYDROXYBUTYRYL-COA DEHYDROGENASE) |
| | | (BHBD) >gi\|1209052 (U32229) HbdA [Bradyrhizobium japonicum] Length = 293 |
| 839 | 2028839 | 1E-14 >gi\|3461840 (AC005315) reverse transcriptase [Arabidopsis |
| | | thaliana] Length = 1529 |
| 840 | 2028840 | 1E-16 >dbj\|BAA75684.1\| (AB017693) transcription factor [Nicotiana |
| | | tabacum] Length = 291 |
| 841 | 2028841 | 8E-66 >gi\|2160694 (U73528) B′ regulatory subunit of PP2A [Arabidopsis |
| | | thaliana] Length = 522 |
| 842 | 2028842 | Tyr_Phospho_Site(194-200) |
| 843 | 2028843 | Pkc_Phospho_Site(28-30) |
| 844 | 2028844 | 3′ 2E-23 >gi\|2129770\|pir∥S71224 xyloglucan endotransglycosylase-related |
| | | protein XTR-2 - Arabidopsis thaliana >gi\|1244756 (U43487) xyloglucan |
| | | endotransglycosylase-related protein [Arabidopsis thaliana] |
| | | >gi\|2154611\|dbj\|BAA20290\| (D63510) endoxyloglucan transferase related protein |
| | | [Arabidopsis thaliana] >gi\|5533311\|gb\|AAD45124.1\|AF163820_1 (AF163820) |
| | | endoxyloglucan transferase [Arabidopsis thaliana] Length = 332 |
| 845 | 2028845 | 3′ Pkc_Phospho_Site(42-44) |
| 846 | 2028846 | 3′ Tyr_Phospho_Site(152-160) |
| 847 | 2028847 | 3′ 8E-13 >gi\|1076421\|pir∥S46523 transcription factor TGA3 - Arabidopsis |
| | | thaliana >gi\|304113 (L10209) transcription factor [Arabidopsis thaliana] Length = |
| | | 384 |
| 848 | 2028848 | 3′ Pkc_Phospho_Site(2-4) |
| 849 | 2028849 | 5′ Tyr_Phospho_Site(764-771) |
| 850 | 2028850 | 2E-65 >emb\|CAA67338\| (X98806) peroxidase ATP20a [Arabidopsis |
| | | thaliana] Length = 330 |
| 851 | 2028851 | 3E-99 >emb\|CAB45075.1\| (AL078637) serine/threonine kinase-like protein |
| | | [Arabidopsis thaliana] Length = 445 |
| 852 | 2028852 | 4E-71 >emb\|CAB10698\| (Z97558) argininosuccinate lyase [Arabidopsis |
| | | thaliana] Length = 517 |
| 853 | 2028853 | 4E-72 >sp\|P46086\|KIME_ARATH MEVALONATE KINASE (MK) |
| | | >gi\|541880\|pir∥S42088 mevalonate kinase (EC 2.7.1.36) - Arabidopsis thaliana |
| | | >gi\|456614\|emb\|CAA54820\| (X77793) mevalonate kinase [Arabidopsis thaliana] |
| | | >gi\|4883990\|gb\|AAD31719.1\|AF141853_1 (AF141853) mevalonate kinase |
| | | [Arabidopsis thaliana] Length = 378 |
| 854 | 2028854 | Tyr_Phospho_Site(53-60) |
| 855 | 2028855 | Pkc_Phospho_Site(62-64) |
| 856 | 2028856 | 2E-17 >gi\|1899188 (U90212) DNA binding protein ACBF [Nicotiana |
| | | tabacum] Length = 428 |
| 857 | 2028857 | Tyr_Phospho_Site(364-371) |
| 858 | 2028858 | 2E-65 >sp\|P25284\|NUEM_NEUCR NADH-UBIQUINONE |
| | | OXIDOREDUCTASE 40 KD SUBUNIT PRECURSOR (COMPLEX I-40 KD) (Cl- |
| | | 40 KD) >gi\|101865\|pir∥S13025 NADH dehydrogenase (ubiquinone) (EC 1.6.5.3) |
| | | 40K chain - Neurospora crassa >gi\|3046\|emb\|CAA39 |
| 859 | 2028859 | 7E-25 >gi\|2191150 (AF007269) similar to mitochondrial carrier family |
| | | [Arabidopsis thaliana] Length = 352 |
| 860 | 2028860 | 3′ 8E-21 >gi\|4218120\|emb\|CAA22974.1\| (AL035353) Proline-rich APG-like |
| | | protein [Arabidopsis thaliana] Length = 367 |
| 861 | 2028861 | 3′ Tyr_Phospho_Site(684-690) |
| 862 | 2028862 | 3′ Pkc_Phospho_Site(49-51) |
| 863 | 2028863 | 3′ Tyr_Phospho_Site(485-493) |
| 864 | 2028864 | 3′ Wd_Repeats(436-450) |
| 865 | 2028865 | 3′ Pkc_Phospho_Site(50-52) |
| 866 | 2028866 | 3′ Pkc_Phospho_Site(23-25) |
| 867 | 2028867 | 3′ Pkc_Phospho_Site(2-4) |
| 868 | 2028868 | 3′ Pkc_Phospho_Site(5-7) |
| 869 | 2028869 | 5′ 3E-65 >gi\|2827708\|emb\|CAA16681\| (AL021684) myb - related protein |
| | | [Arabidopsis thaliana] Length = 374 |
| 870 | 2028870 | 5′ Pkc_Phospho_Site(101-103) |
| 871 | 2028871 | 5′ 7E-22 >gi\|322752\|pir∥A44226 auxin-independent growth promoter - |
| | | Nicotiana tabacum >gi\|559921\|emb\|CAA56570\| (X80301) axi 1 [Nicotiana |
| | | tabacum] Length = 569 |
| 872 | 2028872 | Pkc_Phospho_Site(26-28) |
| 873 | 2028873 | 4E-40 >gi\|2435517 (AF024504) contains similarity to peptidase family |
| | | A1 [Arabidopsis thaliana] Length = 472 |
| 874 | 2028874 | Pkc_Phospho Site(47-49) |
| 875 | 2028875 | 6E-43 >emb\|CAB43855.1\| (AL078465) isp4 like protein [Arabidopsis |
| | | thaliana] Length = 753 |
| 876 | 2028876 | 2E-53 >sp\|P54641\|VATX_DICDI VACUOLAR ATP SYNTHASE SUBUNIT |
| | | AC39 (V-ATPASE AC39 SUBUNIT) (41 KD ACCESSORY PROTEIN) (DVA41) |
| | | >gi\|626048\|pir∥A55016 lysosomal membrane protein DVA41 - slime mold |
| | | (Dictyostelium discoideum) >gi\|532733 (U13150) vacuolar ATPase subunit |
| | | DVA41 [Dictyosteli |
| 877 | 2028877 | 1E-36 >emb\|CAA18734.1\| (AL022604) cysteine proteinase-like protein |
| | | [Arabidopsis thaliana] Length = 355 |
| 878 | 2028878 | 8E-12 >pir∥S71365 AP2 domain-containing protein - Arabidopsis |
| | | thaliana >gi\|1209099 (U40256) AINTEGUMENTA [Arabidopsis thaliana] |
| | | >gi\|1244708 (U41339) ANT [Arabidopsis thaliana] |
| | | >gi\|4490720\|emb\|CAB38923.1\| (AL035709) ovule development protein |
| | | aintegumenta (ANT) [Arabidopsis thaliana] Length = 555 |
| 879 | 2028879 | 2E-60 >gi\|3738302 (AC005309) tubby-like protein [Arabidopsis thaliana] |
| | | >gi\|4249398 (AC006072) tubby protein [Arabidopsis thaliana] Length = 407 |
| 880 | 2028880 | Pkc_Phospho_Site(29-31) |
| 881 | 2028881 | 1E-67 ) >emb\|CAA16700.1\| (AL021687) kinase-like protein [Arabidopsis |
| | | thaliana] Length = 290 |
| 882 | 2028882 | Pkc_Phospho_Site(2-4) |
| 883 | 2028883 | 1E-23 >emb\|CAB40952.1\| (AL049638) C-4 sterol methyl oxidase |
| | | [Arabidopsis thaliana] Length = 303 |
| 884 | 2028884 | 3′ Pkc_Phospho_Site(23-25) |
| 885 | 2028885 | 3′ Pkc_Phospho_Site(11-13) |
| 886 | 2028886 | 3′ 7E-12 >gi\|5103828\|gb\|AAD39658.1\|AC0075912_3 (AC007591) Similar to |
| | | gi\|22113 Ac transposase (ORFa) from Zea mays transcript gb\|X05424. |
| | | [Arabidopsis thaliana] Length = 799 |
| 887 | 2028887 | 3′ Pkc_Phospho_Site(116-118) |
| 888 | 2028888 | 3′ Tyr_Phospho_Site(532-539) |
| 889 | 2028889 | 5′ Pkc_Phospho_Site(61-63) |
| 890 | 2028890 | 5′ Pkc_Phospho_Site(137-139) |
| 891 | 2028891 | 5′ Pkc_Phospho_Site(26-28) |
| 892 | 2028892 | 5′ Pkc_Phospho_Site(74-76) |
| 893 | 2028893 | 5′ Tyr_Phospho_Site(604-610) |
| 894 | 2028894 | 5′ Tyr_Phospho_Site(666-674) |
| 895 | 2028895 | 8E-51 >gi\|1336084 (U56635) Arabidopsis thaliana glutamate |
| | | dehydrogenase 2 (GDH2) mRNA, complete cds. [Arabidopsis thaliana] Length = |
| | | 411 |
| 896 | 2028896 | 2E-50 >gi\|3885336 (AC005623) receptor-like protein kinase |
| | | [Arabidopsis thaliana] Length = 1007 |
| 897 | 2028897 | 2E-31 >pir∥S59558 GTP-binding protein, 68K - Arabidopsis thaliana |
| | | >gi\|807577 (L38614) GTP-binding protein [Arabidopsis thaliana] Length = 610 |
| 898 | 2028898 | Pkc_Phospho_Site(7-9) |
| 899 | 2028899 | 2E-51 >gi\|2231175 (U44050) mis5p [Xenopus laevis] Length = 796 |
| 900 | 2028900 | 4E-24 >emb\|CAB57866.1\| (AJ243972) 6-phosphogluconolactonase [Homo |
| | | sapiens] Length = 258 |
| 901 | 2028901 | Tyr_Phospho_Site(315-323) |
| 902 | 2028902 | 2E-80 >gb\|AAD25843.1\|AC006951_22 (AC006951) acyl-CoA synthetase |
| | | [Arabidopsis thaliana] >gi\|4689469\|gb\|AAD27905.1\|AC007213_3 (AC007213) |
| | | acyl-CoA synthetase [Arabidopsis thaliana] Length = 720 |
| 903 | 2028903 | Pkc_Phospho_Site(12-14) |
| 904 | 2028904 | Pkc_Phospho_Site(52-54) |
| 905 | 2028905 | 1E-100 >pir∥S59558 GTP-binding protein, 68K - Arabidopsis thaliana |
| | | >gi\|807577 (L38614) GTP-binding protein [Arabidopsis thaliana] Length = 610 |
| 906 | 2028906 | 5E-91 >gi\|1773295 (U76707) regulatory protein NPR1 [Arabidopsis |
| | | thaliana] >gi\|1916912 (U87794) transcription factor inhibitor I kappa B homolog |
| | | [Arabidopsis thaliana] Length 593 |
| 907 | 2028907 | Tyr_Phospho_Site(812-819) |
| 908 | 2028908 | 3E-48 >gi\|1750376 (U80808) ubiquitin activating enzyme [Arabidopsis |
| | | thaliana] >gi\|3150409 (AC004165) ubiquitin activating enzyme (UBA1) |
| | | [Arabidopsis thaliana] Length = 1080 |
| 909 | 2028909 | 3E-17 >gi\|2924793 (AC002334) similar to synaptobrevin [Arabidopsis |
| | | thaliana] Length = 212 |
| 910 | 2028910 | 3E-27 >pir∥S71284 MYB-related protein 33.3K - Arabidopsis thaliana |
| | | >gi\|1263095\|emb\|CAA90809\| (Z54136) MYB-related protein [Arabidopsis |
| | | thaliana] Length = 305 |
| 911 | 2028911 | Tyr_Phospho_Site(91-99) |
| 912 | 2028912 | 4E-37 >gb\|AAD23951.1\|AF093108_1 (AF093108) histone H3 [Tortula ruralis] |
| | | Length = 117 |
| 913 | 2028913 | Tyr_Phospho_Site(1497-1504) |
| 914 | 2028914 | 3E-17 >gb\|AAD48836.1\|AF165924_1 (AF165924) auxin-induced basic helix- |
| | | loop-helix transcription factor [Gossypium hirsutum] Length = 314 |
| 915 | 2028915 | Pkc_Phospho_Site(52-54) |
| 916 | 2028916 | 4E-60 ) >sp\|Q39172\|P1_ARATH PROBABLE NADP-DEPENDENT |
| | | OXIDOREDUCTASE P1 >gi\|1362013\|pir∥S57611 zeta-crystallin homolog - |
| | | Arabidopsis thaliana >gi\|886428\|emb\|CAA89838\| (Z49768) zeta-crystallin |
| | | homologue [Arabidopsis thaliana] Length = 345 |
| 917 | 2028917 | Tyr_Phospho_Site(9-16) |
| 918 | 2028918 | Pkc_Phospho_Site(18-20) |
| 919 | 2028919 | 8E-77 >gi\|2454184 (U80186) pyruvate dehydrogenase E1 beta subunit |
| | | [Arabidopsis thaliana] Length = 406 |
| 920 | 2028920 | 4E-28 >emb\|CAB56768.1\| (AJ132096) squamosa promoter binding |
| | | protein-like 12 [Arabidopsis thaliana] >gi\|6006403\|emb\|CAB56769.1\| (AJ132097) |
| | | squamosa promoter binding protein-like 12 [Arabidopsis thaliana] Length = 927 |
| 921 | 2028921 | 3′ 6E-32 >gi\|4678360\|emb\|CAB41170.1\| (AL049659) Cytochrome P450-like |
| | | protein [Arabidopsis thaliana] Length = 490 |
| 922 | 2028922 | 3′ 6E-32 >gi\|416758\|sp\|P32826\|CBPX_ARATH SERINE |
| | | CARBOXYPEPTIDASE PRECURSOR >gi\|166674 (M81130) carboxypeptidase |
| | | Y-like protein [Arabidopsis thaliana] >gi\|445120\|prf∥1908426A carboxypeptidase |
| | | Y [Arabidopsis thaliana] Length = 539 |
| 923 | 2028923 | 3′ Pkc_Phospho_Site(76-78) |
| 924 | 2028924 | 3′ Pkc_Phospho_Site(21-23) |
| 925 | 2028925 | 3′ Tyr_Phospho_Site(147-154) |
| 926 | 2028926 | 3′ Tyr_Phospho_Site(30-38) |
| 927 | 2028927 | 3′ Tyr_Phospho_Site(474-481) |
| 928 | 2028928 | 3′ 6E-22 >gi\|2970034\|dbj\|BAA25180\| (D88536) delta 9 desaturase |
| | | [Arabidopsis thaliana] Length = 305 |
| 929 | 2028929 | 5′ 5E-48 >gi\|2944446 (AF050756) cysteine endopeptidase precursor |
| | | [Ricinus communis] Length = 360 |
| 930 | 2028930 | Tyr_Phospho_Site(672-680) |
| 931 | 2028931 | Tyr_Phospho_Site(28-36) |
| 932 | 2028932 | 4E-23 >sp\|P74707\|RF1_SYNY3 PEPTIDE CHAIN RELEASE FACTOR 1 |
| | | (RF-1) >gi\|1653916\|dbj\|BAA18826\|(D90917) peptide chain release factor |
| | | [Synechocystis sp.] Length = 365 |
| 933 | 2028933 | 1E-12 >gi\|2947070 (AC002521) Ser/Thr protein kinase [Arabidopsis |
| | | thaliana] Length = 429 |
| 934 | 2028934 | 1E-92 >gi\|2062171 (AC001645) DNA binding protein (CDC27SH) isolog |
| | | [Arabidopsis thaliana] Length = 717 |
| 935 | 2028935 | 7E-29 >pir∥S51938 protein kinase homolog - [Arabidopsis thaliana |
| | | >gi\|717180\|emb\|CAA55866\| (X79279) protein kinase homologous to shaggy and |
| | | glycogen synthase kinase-3 [Arabidopsis thaliana] Length = 421 |
| 936 | 2028936 | Pkc_Phospho_Site(99-101) |
| 937 | 2028937 | Pkc_Phospho_Site(79-81) |
| 938 | 2028938 | 7E-21 >gi\|1399183 (U50739) Lycopene beta cyclase [Arabidopsis |
| | | thaliana] >gi\|6056202\|gb\|AAF02819.1\|AC009400_15 (AC009400) lycopene beta |
| | | cyclase [Arabidopsis thaliana] Length = 501 |
| 939 | 2028939 | Tyr_Phospho_Site(324-331) |
| 940 | 2028940 | 3′ Pkc_Phospho_Site(7-9) |
| 941 | 2028941 | 3′ 6E-11 >gi\|4115538\|dbj\|BAA36412\| (AB012116) UDP-glycose:flavonoid |
| | | glycosyltransferase [Vigna mungo] Length = 381 |
| 942 | 2028942 | 3′ Tyr_Phospho_Site(584-591) |
| 943 | 2028943 | 3′ Pkc_Phospho_Site(94-96) |
| 944 | 2028944 | 5′ 3E-43 >gi\|3912988\|sp\|O22456\|AGL9_ARATH FLORAL HOMEOTIC |
| | | PROTEIN AGL9 >gi\|2345158 (AF015552) AGL9 [Arabidopsis thaliana] |
| | | >gi\|2829878 (AC002396) AGL9 [Arabidopsis thaliana] Length = 251 |
| 945 | 2028945 | 5′ Pkc_Phospho_Site(58-60) |
| 946 | 2028946 | Pkc_Phospho_Site(31-33) |
| 947 | 2028947 | 1E-70 >sp\|P41343\|FENR_MESCR FERREDOXIN-NADP REDUCTASE |
| | | PRECURSOR (FNR) >gi\|320548\|pir∥A44974 ferredoxin-NADP+ reductase (EC |
| | | 1.18.1.2) precursor - common ice plant >gi\|167256 (M25528) ferredoxin-NADP+ |
| | | reductase precursor (fnrA; EC 1.6.7.1) [Mesembryanthemum crystallinum] >gi\|22 |
| 948 | 2028948 | Pkc_Phospho_Site(152-154) |
| 949 | 2028949 | 4E-52 >gb\|AAC78441.1\| (U92460) 12-oxophytodienoate reductase OPR2 |
| | | [Arabidopsis thaliana] >gi\|6143903\|gb\|AAF04449.1\|AC010718_18 (A010718) |
| | | 12-oxophytodienoate reductase (OPR2) [Arabidopsis thaliana] Length = 374 |
| 950 | 2028950 | Tyr_Phospho_Site(874-880) |
| 951 | 2028951 | 5E-92 >gi\|3377800 (AF075597) similar to glycosyl hydrolases family 9 |
| | | (PFam:glycosyl_hydro5.hmm, score: 100.70) [Arabidopsis thaliana] Length = 516 |
| 952 | 2028952 | 2E-11 >emb\|CAB56146.1\| (AL117669) large secreted protein |
| | | [Streptomyces coelicolor A3(2)] Length = 809 |
| 953 | 2028953 | 1E-155 >gb\|AAC95171.1\| (AC005970) protein kinase [Arabidopsis |
| | | thaliana] Length = 462 |
| 954 | 2028954 | Tyr_Phospho_Site(183-189) |
| 955 | 2028955 | 1E-23 >gi\|3319370 (AF077409) contains similarity to C3HC4-type zinc |
| | | fingers (Pfam: zf-C3HC4.hmm, score: 32.94) [Arabidopsis thaliana] Length = 233 |
| 956 | 2028956 | Pkc_Phospho_Site(259-261) |
| 957 | 2028957 | 2E-73 >gb\|AAD46404.1\|AF096248_1 (AF096248) ethylene-responsive RNA |
| | | helicase [Lycopersicon esculentum] Length = 474 |
| 958 | 2028958 | 8E-13 >gi\|3377808 (AF075597) contains similarity to Nicotiana alata |
| | | pistil extensin-like protein (GB:U45958) [Arabidopsis thaliana] Length = 165 |
| 959 | 2028959 | 3′ Pkc_Phospho_Site(20-22) |
| 960 | 2028960 | 3′ 5E-13 >gi\|5453670\|ref\|NP_006339.1\|pGTC90\| Golgi transport complex |
| | | protein (90 kDa) >gi\|3808235 (AF058718) 13 S Golgi transport complex 90 kD |
| | | subunit brain-specific isoform [Homo sapiens] Length = 839 |
| 961 | 2028961 | 3′ 2E-25 >gi\|2244748\|emb\|CAB10171.1\| (Z97335) disease resistance Cf-2 like |
| | | protein [Arabidopsis thaliana] Length = 869 |
| 962 | 2028962 | 3′ Pkc_Phospho_Site(31-33) |
| 963 | 2028963 | 3′ Pkc_Phospho_Site(134-136) |
| 964 | 2028964 | 5′ Tyr_Phospho_Site(12-20) |
| 965 | 2028965 | 8E-67 >emb\|CAB46000.1\| (Z97335) selenium-binding protein like |
| | | [Arabidopsis thaliana] Length = 478 |
| 966 | 2028966 | Pkc_Phospho_Site(96-98) |
| 967 | 2028967 | Pkc_Phospho_Site(62-64) |
| 968 | 2028968 | Pkc_Phospho_Site(25-27) |
| 969 | 2028969 | Pkc_Phospho_Site(47-49) |
| 970 | 2028970 | 5E-94 >dbj\|BAA24226\| (AB001568) phospholipid hydroperoxide |
| | | glutathione peroxidase-like protein [Arabidopsis thaliana] >gi\|3004869 |
| | | (AF030132) glutathione peroxidase; ATGP1 [Arabidopsis thaliana] |
| | | >gi\|4539451\|emb\|CAB39931.1\| (AL049500) phospholipid hydroperoxide |
| | | glutathione peroxidase [Arabidopsis thaliana] Length = 169 |
| 971 | 2028971 | 2E-56 >sp\|P10797\|RBS3_ARATH RIBULOSE BISPHOSPHATE |
| | | CARBOXYLASE SMALL CHAIN 2B PRECURSOR (RUBISCO SMALL SUBUNIT |
| | | 2B) >gi\|68061\|pir∥RKMUB2 ribulose-bisphosphate carboxylase (EC 4.1.1.39) |
| | | small chain B2 precursor - Arabidopsis tha |
| 972 | 2028972 | 3E-75 >gb\|AAD41430.1\|AC007727_19 (AC007727) Similar to gb\|Z11499 protein |
| | | disulfide isomerase from Medicago sativa. ESTs gb\|Al099693, gb\|R65226, |
| | | gb\|AA657311, gb\|T43068, gb\|T42754, gb\|T14005, gb\|T76445, gb\|H36733, |
| | | gb\|T43168 and gb\|T |
| 973 | 2028973 | 1E-100 >sp\|O04019\|PRSA_ARATH 26S PROTEASE REGULATORY |
| | | SUBUNIT 6A HOMOLOG (TAT-BINDING PROTEIN HOMOLOG 1) (TBP-1) |
| | | >gi\|2342675 (AC000106) Similar to probable Mg-dependent ATPase |
| | | (pir\|S56671). ESTs gb\|T46782, gb\|AA04798 come from th |
| 974 | 2028974 | 1E-43 >gb\|AAD30975.1\|AF121895_1 (AF121895) dolichol-phosphate-mannose |
| | | synthase [Cricetulus griseus] Length = 266 |
| 975 | 2028975 | 2E-88 >gi\|3702321 (AC005397) TGF-beta receptor interacting protein |
| | | [Arabidopsis thaliana] Length = 328 |
| 976 | 2028976 | 6E-67 >gi\|619745 (U18929) cytochrome p450 dependent |
| | | monooxygenase [Arabidopsis thaliana] Length = 502 |
| 977 | 2028977 | 3′ Tyr_Phospho_Site(600-607) |
| 978 | 2028978 | 3′ Pkc_Phospho_Site(17-19) |
| 979 | 2028979 | 3′ Pkc_Phospho_Site(28-30) |
| 980 | 2028980 | 5′ 1E-37 >gi\|3643088\|gb\|AAC36699\| (AF075581) protein phosphatase-2C; |
| | | PP2C [Mesembryanthemum crystallinum] Length = 344 |
| 981 | 2028981 | 5′ 6E-64 >gi\|2462746 (AC002292) Similar to ATP-citrate-lyase |
| | | [Arabidopsis thaliana] Length = 423 |
| 982 | 2028982 | 5′ 5E-14 >gi\|2459737 (U95375) oxidoreductase [Haloferax volcanii] |
| | | Length = 255 |
| 983 | 2028983 | 2E-19 >sp\|P46689\|GAS1_ARATH GIBBERELLIN-REGULATED PROTEIN 1 |
| | | PRECURSOR >gi\|2129588\|pir∥S71441 GAST1 protein homolog (clone GASA1) - |
| | | Arabidopsis thaliana >gi\|887939 (U11766) GAST1 protein homolog [Arabidopsis |
| | | thaliana] Length = 98 |
| 984 | 2028984 | 2E-53 >gi\|3834312 (AC005679) Strong similarity to glycoprotein EP1 |
| | | gb\|L16983 Daucus carota and a member of S locus glycoprotein family |
| | | PF\|00954. ESTs gb\|AA067487, gb\|Z35737, gb\|Z30815, gb\|Z35350, |
| | | gb\|AA713171, gb\|AI100553, gb\|Z34248, gb\|AA728536, gb\|Z30816 an . . . Length |
| 985 | 2028985 | Tyr_Phospho_Site(1020-1028) |
| 986 | 2028986 | Tyr_Phospho_Site(786-794) |
| 987 | 2028987 | Pkc_Phospho_Site(2-4) |
| 988 | 2028988 | Tyr_Phospho_Site(555-561) |
| 989 | 2028989 | Tyr_Phospho_Site(10-17) |
| 990 | 2028990 | 9E-62 >gb\|AAD41999.1\|AC006233_10 (AC006233) NAM protein [Arabidopsis |
| | | thaliana] Length = 335 |
| 991 | 2028991 | 6E-37 >sp\|P35133\|UBCA_ARATH UBIQUITIN-CONJUGATING ENZYME E2- |
| | | 17 KD 10 (UBIQUITIN-PROTEIN LIGASE 10) (UBIQUITIN CARRIER PROTEIN |
| | | 10) >gi\|421858\|pir∥S32672 ubiquitin-protein ligase (EC 6.3.2.19) UBC10 - |
| | | Arabidopsis thaliana >gi\|297878\|emb\|CAA78715\| (Z14991) ubiquitin conjugating |
| | | enzyme [Arabidopsis thaliana] >gi\|349213 (L00640) ubiquitin conjugating enzyme |
| | | [Arabidopsis thaliana] Length = 148 |
| 992 | 2028992 | 2E-25 >emb\|CAA16884.1\| (AL021749) SOF1 protein-like protein |
| | | [Arabidopsis thaliana] Length = 283 |
| 993 | 2028993 | 4E-40 >gb\|AAB95309.1\| (AC003105) soluble epoxide hydrolase |
| | | [Arabidopsis thaliana] Length = 320 |
| 994 | 2028994 | 7E-28 >gb\|AAD24462.1\|AF118855_1 (AF118855) trans-prenyltransferase [Mus |
| | | musculus] Length = 336 |
| 995 | 2028995 | Tyr_Phospho_Site(674-680) |
| 996 | 2028996 | Pkc_Phospho_Site(36-38) |
| 997 | 2028997 | 9E-14 >dbj\|BAA21425\| (AB004537) WEB1 PROTEIN |
| | | [Schizosaccharomyces pombe] >gi\|2950507\|emb\|CAA17835\| (AL022072) web1 |
| | | homolog; protein transport protein; WD-repeat protein [Schizosaccharomyces |
| | | pombe] Length = 1224 |
| 998 | 2028998 | 7E-47 >emb\|CAB43966.1\| (AL078579) acyl-CoA binding protein |
| | | [Arabidopsis thaliana] Length = 354 |
| 999 | 2028999 | 2E-50 >gi\|1732570 (U72153) beta-glucosidase [Arabidopsis thaliana] |
| | | Length = 525 |

The application's sequence listing, which the Patent Office published only in electronic form, follows.

SEQUENCE LISTING (999 sequences)

SEQ ID NO: 1 - DNA, 437 bp, Arabidopsis thaliana
  misc_feature (1)...(437): n = A,T,C or G
gatccggcgcgccggtcgcggccgaggtacagtaggtcactgcattcgggtgaagnnnnttaactgacatttcatcaagcagttccttagctttttcaatttcaccagatctgcaaaagccaccaagtaacatgttgtatatgataacattaggagtcaaaccttcttcaaccatctcatcaaaaatactagaagccttctgcatatttcccaacttagaaaatccattaatgagaacaccataagagaatacatcaggtgcaatacccttcccacgcatttcgcggaaaatctcctcggcatcatctactttatcatttttaaaaagaccattcataagaacagtgtatgttttagcatcccccaggatcccttggtcaaccatggatctatatgctgaacacgcctctattactttcccctttttgcaatactca

SEQ ID NO: 2 - DNA, 436 bp, Arabidopsis thaliana
ttttttttttttttttttttttttcagaattataataatatttttatttttaaatactgaaatacaggtttcataattaaaccttgttttattacaagagattgtaaactcgaaagaaattactgattaaagaaacatcggagtaggtagtaaatcattgtagatatgagagccttaaaacaagatgaagttcgtgactatatttccatctaaccatatggttttatagcctttatagtctcgaattacgaaggaattggagagaagtaaactccgatagcgtcgaaagcaccaccatcccgcccatagaatccaacaatagcattaccttggctctccaacacaaatttggtacctgacacaaacccatatgtgggagagattctcccttttgatgttttgaaaatcaacgacctaatgaccaaaacgttatcat

SEQ ID NO: 3 - DNA, 436 bp, Arabidopsis thaliana
agttgaaagagattaataaccaaacccatttgttctgagttagttactttaacaatgatgaaactgaatgaaacttagggagaggttttatatgtacagaaaacctcagcagcagaatcagcaatttttaaatctgaacaacaacaacataaaatgcttttgatgaattctcaatgtttttgtcttcctcttcttacgcaatgtgctttctgctctttgcccagaacggtattgcgggtgtacgctttaaagccttcacgctaaacggactgttcttgctcatcaaacaggttccgcggttaacgtcacaaaccgggtactcatgaggacagcaacttgagttatcatcgcagcaagtagcagcttcgagcgggcaacatccccatccgaagcagtacttaccatacttgtagagacaacaacaagtgttgctctc

SEQ ID NO: 4 - DNA, 436 bp, Arabidopsis thaliana
tcaggtatgatgatgttctggggagaggagctttcaagactgtatataaggcgtttgacgaagtagacgggattgaagttgcttggaacctagttagcattgaagatgtaatgcagatgcctggtcaacttgaaaggctatattctgaagttcatctactaaaggctctaaaacatgaaaacatcatcaaactcttttactcttgggttgacgaaaagaacaagaccattaacatgatcacagagcttttcacctctggtagtctcagggtatatcgtaagaagcataggaaggttgatcccaaggccatcaagaactgggcaaggcagattctcaaaggcctgaactatttgcattctcagaaccctccggtaattcaccgggatctgaagtgtgacaatatatttgtcaatggaaatactggagaggtcaaaat

SEQ ID NO: 5 - DNA, 436 bp, Arabidopsis thaliana
cctccaaggaagaagtagaaagatgggatttcatgttcttagacctcccatagctttacgcagctctctcctcggcttcttatccaaatcacacaatcctcttctccccgggagatgggttcaagctggagaatgcagtaccatgagatgttttgcttctgctactcgtggcaaaaacaaaaaacagagactagatgaggcatgtgttgaaaggtttaacgaatacagtcgcacactaatacaatcgtggattatgcaaggcaaagttcttgtggatgggagaagagttattaaagctggaatgcctgtatctactactgcagctataaagatcacagctgaggttccaaaatttgtatgtagaggtggactcaagctggaagctgcacttgagaagctagatgttgatgtttctgagaaagtagttcttgatgca

SEQ ID NO: 6 - DNA, 436 bp, Arabidopsis thaliana
  misc_feature (1)...(436): n = A,T,C or G
tcgagatgttcaccacagaagatgttgcagatggtttcgtcatgctcctggagtctgcagaagatacagctcttgacattctggatgcgtccaacgaacttgctctgttcttagctagagctgtgatcgatgatgttttagcaccttttaacctggaagagatcagtagcaaactacgccctaactcaagcggaactgaaaccgtgaagatggctaggtcactcatctttgctcgacatgcaggagagaggcttctaagatgctggggaggtgggagcggttgggcagtggaagatgcaaaggacaagatatcaaatctcctggaggaatacgaaagctcanngctggtatcagaagcatgcaaatgcatccatgagctaggcatgcctttcttcaaccatgaggtggtgaagaaagcactggtgatgggtatgga

SEQ ID NO: 7 - DNA, 436 bp, Arabidopsis thaliana
tgggtcagctacttggctactgatagtttgttccctgaatggaaaatctggacccagtttttagatgaatctactgagggtctaaggctagatgggcttgaggagtctcacccgatagaggtggaggttaatcatgctgctgaaattgatgaaatatttgatgcaataagctacagaaagggtgcatctgtcatccgcatgctacaaagctatcttggtgctgaggtttttcagaagtctcttgctgcatacattaaaaatcacgcttattcaaacgcgaagacagaagatttatgggctgctttggaagcgggatccggagaacctgtgaacaagcttatgagttcttggacaaagcaaaaaggatatcctgtcgtctcagccaaaataaaagatggaaaattggaactcgagcagtctcgattcttgtcaagtg

SEQ ID NO: 8 - DNA, 436 bp, Arabidopsis thaliana
atggagacgccgacgatgaagcccgatacggttttgattcttgattacggctcccaatacacacatctcatcactcgccgtattcgatctctcaacgtcttctctctcgttatcagtggaacttcatcgctcaaatcaatcactagctataacccacgagttgttatcctctccggtggtcctcactctgttcacgcgctcgacgcgccgagtttccccgaggggtttatcgaatgggcagagtcgaacggtgttcctgttttggggatttgctatggtttgcaattgattgtgcagaagcttggaggcgttgttgtggaaggagagagtaaagagtatgggaaaatggagattgaagtgaagggtaaatcggagatttttgggtcggagagtggtggagagaagcaaatggtttggatgagtcatggtgatgaag

SEQ ID NO: 9 - DNA, 436 bp, Arabidopsis thaliana
  misc_feature (1)...(436): n = A,T,C or G
actcctgccagaagttctcgtgctattgcaccaccagaattatctcctaggattgcctctgaaatttcaatggcacctcctgctgttgtttcgcagcctattcccaagtctaatgattcagagaaaatatggcattacaaggacccatctggtaaagttcaaggacctttttcgatggcgcagctccgtaaatggaacaacactgggtacttccctgctaagttggaaatctggaaagcaaatgagtcaccgttggactctgttctactgactgatgcattggctggactatttcagaagcaaacccaggcggtggataatagctatatgaaagctcaggtagcagctttttctggtcaatcaagccaatctgaacccaatttannttttgctgctaggattgctccaacaaccattgagattcctaggaattccc

SEQ ID NO: 10 - DNA, 436 bp, Arabidopsis thaliana
  misc_feature (1)...(436): n = A,T,C or G
agcacaattgaagaaagttagattccagatatgggtaaacgagtcttagatccccctagttatacaaattcagagagtacaaatctttttcctctgttttcagaaaaaggattcagataaaaccttgagatagagtttcaccatatataatgttatttaaatgacaatgatctttctccatttgcagtcttctttaagcaccacttgcgtaaagacgagtccattccttagctgtttccacagcttctgcctcattgctcttccaatgcttagctatgttctcagacagaggatcatctgggtttggtgcacttaaaagagcttggatactcaagagcacagttcgtatttgtagtgcaggactccacttgtctttcagtatgtnaaggcagattcttccaagctatatatacatgataagtgcaaacaaaacatg

SEQ ID NO: 11 - DNA, 436 bp, Arabidopsis thaliana
tttttttatacaagatggtactatgaaatttatcattataggctatatttttactacacgcttcaaaacatcaaacagatggtacatattactaccctagatttgggttaacgaatcaacagcagtattatttcaaaaataaatatggagatatgtacatatccgagatccatttctgtttcacacatttctttagctactatgaaatttatgtagcgtttcttagttaatataaggtttacttgccaataatgtagttccagatgacaatagagccgagtttgccctagtcgccttcgtgtagatcacatccctgaattttgcctgaagttgcttttgatacatggtgtggtctctcgacgaacatgtgatggaactttccagccgaagctttgatctcaacttctgtctcaagcttccccactaaactaagacg

SEQ ID NO: 12 - DNA, 436 bp, Arabidopsis thaliana
ccacgcgtccgatcggacaaaagctagtaatgggagacctcaaggttcatccggctttaaagcttataaagtccaaagacgaacccattgttaaggtcgccggaggacgtgtcactgacacgcaaaagaaatcgtctgacacgcaaaagaaataacaccggtgagtcatattaactgcgattatccggtgcaatctccaaatgttgaccaaaaatgaatggatcgatcttcttagaactctaaaggtcctttcggatggaggtttctttatgtgttattattagtgttgccagaagatgaaatatttcctatcttttgattctacaatgcatttattttctattcacaatcaactacttttatttacagacctctaataagcgtagaaagggaaacaaaatttaatctaaaaaaaaaaaaaaaaaaaaaaaaaaaa

SEQ ID NO: 13 - DNA, 436 bp, Arabidopsis thaliana
tcacttcatggattataataatcaactcattataaaagcacatctaaagagtttataaaacaacaaaacacaattatttcaccaaggctcatcaggataatcgaacggtacaggttgaagaggggaagtcttgcctagatccgagtgtacgaaaccatatttacgcatcacttgattatcagcgaaattaatggctttgatcatcccattccaacacgtgtcaccatcgtacatcttgttatgatcaccactacaaggttgacatcccgtaaaatgcgtcacgaacggtctccgtttgcttcctttcccgcctctttctccttttaaaaaccgttcctcacgaaacgcagcgtatcgttcgctcactttctctgcgtgtcgtctacgcaacgtggcgtcttctctttccatctccagataccgttccgttacgttg

SEQ ID NO: 14 - DNA, 436 bp, Arabidopsis thaliana
ccacgcgtccgctaggcagtgagaatgtagagggagaagttgaaccaccaccagagagatcattttgggcgaaatattggatgtatttgataccgctgggactcgtagtgatgaatgccgttacacaagcatcaaacatggctgaagaacccgcgggtggacaggcaggaggggcacaagtgcaaccagctgccaggagaagatgattccacttttacttctcccaaagcaatgaaagctggttagagatgatgattcaacagatcttcatgtaaaccatcttgccatcatttggttttatgtaacctttaattttaatcctcgatcggtgtgtttttgtactcaccaatcgggaaatcaaaaatcttgtcttcatgacatatcaagaacaaagacatttagcagcttccatatcaaaaaaaaaaaaaaaaaaaaa

SEQ ID NO: 15 - DNA, 436 bp, Arabidopsis thaliana
atcagccatggcttcttcgactctcttcaaactcaattcacagacattcaaagctctaaacccatctcctccttcgttatctcctcccaattccagaattttccatcttcatttctccaaatcactctcacaacagcattcaaagctcaaccacaaatcaaccactactcgtttattcgctcctctctgttcctctcttccttcaccttcttcttcttctcctcccctttccaaagaagaagccattaatcaagccaaaacttgtctcctttcatgtctcatcaaacccttaaacaacccaaaactcgcttccccaaaactcaggaagctcaaacaaccaagattccgtcttgaaatcccaatccttgacgatgattctccttcgtcactctctcagctcgctttctcgatctttcatgacttacccatctcgaga

SEQ ID NO: 16 - DNA, 436 bp, Arabidopsis thaliana
tcgagcggccgcccgggcaggtggccgaggaaggataaagagagacgccatgggaagaagacctgcgaggtgttaccgtcagatcaagggtaagccatacccaaagtctcgctactgtcgtggtgtgccagatcccaaaatcaggatctacgatgttggtatgaagaggaagggtgttgatgagtttccattctgtgtccatttggtgtcatgggagaaggagaatgtgtcaagtgaagcacttgaagcagcacgtattgcttgcaacaagtatatggtgaaatctgctgggaaagatgcttttcatttgaggattagggttcatcctttccatgttctcaggattaacaagatgctttcgtgtgctggagctgataggcttcagactggaatgagaggtgcttttggtaaagctcttggtacctcggccgcgacc

SEQ ID NO: 17 - DNA, 436 bp, Arabidopsis thaliana
tgtagaacaaatccttctctgagaaaaaacaacagatccgaattttatctttaatcagccggaaaaaatggagaaagcgatcgagagacaacgcgttcttcttgagcatctccgaccttcttcttcttcttcgcacaattacgaggcttctctatctgcttctgcttgcttggctggggacagtgctgcatatcagaggacctctctctatggagatgatgttgtcattgtcgcggcacataggactccactatgcaagtccaaacgtggcaatttcaaggatacatatcccgatgatttgctcgcacctgttttgagggcattgatagagaagacgaatctaaacccaagtgaagtaggtgacattgttgtgggtactgttttggcacctggatctcagagagccagtgaatgcaggatggctgcgttctatgct

SEQ ID NO: 18 - DNA, 436 bp, Arabidopsis thaliana
ttttttttttaagagcaaactaatatcattccataaaaaaatggaaataatacaaagcacaaaccttgtaccgagagaacccggtttgtatacagtctataacccctaaaccggttctggtcgcaataaaaaacatacagacatttccccaaagatattttaaaaagaataccaaaaatcaaaatcaagatgtaaaaaacactttacagttgtgtttaacaaataaataatatgaagatggaaacaagaagcagaatcatattttggttgtgtagttgttactagggggagttttcatgaagctaatgatcttggaactctcataccaaatccatgcttcactttctcaatcgttggggctaatttgccaaggctgtgaagttcttctcctgaatcttgatcaaggattcttcctgatatatcaacaatgtaagaa

SEQ ID NO: 19 - DNA, 436 bp, Arabidopsis thaliana
gcggccgcagaacaaccacagtttctacgtttagcaactcattatttttaggcgccatcaagaatgggaaagactcctggtaatggatcaagactttgcttctcgggaagaagtcgcctaagtcgaattcggataaccgaagccagaaactgaaatctgctaagaaagaagagctggtggaatcggtgacagaagatttgtcaaacttaacagttgatcctccggtggtttcatcacaaccagttccagcttctactgctcaaaatgtggtttctccaatcaatggtgatgagtccaaggataatctcgagtcaaggaatgacttgggagaagtcgagcttgaacaagctgcaattaaggttcaagctaccttcagagctcatcaggcacgtagagcatttcgaactcttaaaggtatcatcaggctgcaggcagt

SEQ ID NO: 20 - DNA, 436 bp, Arabidopsis thaliana
tcttaatgaaataatgggagcagctgaagcaagagcattgtggcaaagaacagctagtcgttgctttgttgttcatgaggatgctaagatggctccgaggttagcttgttgccaacaccaacaatcttcttcgggcaacaccgaaaaaaacagcttttcttcgggaagttttggagattcctctgatttctcttgtgataccaaatggtggcttaagggatcaactggatttgatgaggaggttacaaactcctttcttgaagataccaaatgcaagaaattgcatgaatttgtcgacttaatcggaatacgagaagaagaagactacagctttattagcaagaaagctgacgctacaacaccgtggtggagaagcacgacggataaagatgaattagctctcatggtggcgactaaatcggttgatcataatatc

SEQ ID NO: 21 - DNA, 436 bp, Arabidopsis thaliana
ccacgcgtccgtgttgctctgtttcactgtgcgtgatcgggaagaagaagaaaatgttggcgattttcgacaagaacgtggcgaaaacacccgaggctcttcagggtcaagagggtggatcggtttgtgctcttaaagataggttcttgccgaaccatttctcctctgtttatcctggtgctgtcaccatcaatctcggatcttctggtttcattgcttgctctctcgagaaacagaaccctcttcttcccagattgtttgctgtggtggatgatatgttctgcatattccaaggacatatagagaacgttccaattcttaagcaacaatatggactaaccaaaacagctacagaggttaccattgtgattgaagcctacagaactctaagagatcgtggtccgtattcagctgaacaagttgttagagattttca

SEQ ID NO: 22 - DNA, 436 bp, Arabidopsis thaliana
ctctaaaatttttcagttccccgatcgccggaattttcgccggtgatgtaattttcccgcgccttttttgggaggtgaatttttttttcttctaaaagctcgagaagagtgaaaaccccagaaatgaccttgcgattcgtatggctccggctgttttcgctaccttaaacgaaccgtcgtaccaggaacaatgcggcgccgtttttatgaggaaatttacaaaccaatccgtcaccgaaaacaccaataaccttccgctcttcaaccctaaccctaaccctaatttcgaaaggagcaattcgagcaagcagtgcgatgactcgtcggaatttggaagctatgctacttttaatctcgctgggtacacctcaagtcagctcagggagcttaagaagcgctttacctcagagctcaagcagattcggatcctgagaga

SEQ ID NO: 23 - DNA, 436 bp, Arabidopsis thaliana
tctggataaaaccaaagatgcttgagagttctttgaaaagacagggtcttaccggaactccttacactcctctcgtcggagatataaagaggaatgttgatatgatgatggaagcgagatctaaacccatcaatgtaacggatgatatcaccccacgtctccttcctcttgccttaaagatgctcaattctcacggaaagactttcttcatatggattggaccacttccaacgattgtgataacgaatcctgagcagatcaaggaagtctttaataaagtcaacgactttgagaaagcttctacattccctttgatcagattgttagcaggtgggcttgcaagttacaagggagataaatgggcgagtcacaggaggatcatcaacccggcttttcacctcgaaaaaatcaagaacatgatccctgcgttctacca

SEQ ID NO: 24 - DNA, 436 bp, Arabidopsis thaliana
gtatcatgacgaatatgttttatcaatctccagaaccagaaggctctaacaaagcaatttcaagtgcctcaaattttcttatcgaccaggtcgatctgattggtggtgtagaatacattttctttgagtactctttggcaaccactagagaggaaagaagaaatctctactcggttttatttgactatgtgctgcatcaaattaatgaggcatgctcatctgctggtctttctgagtacactgatgatgagattcaacctttggctgttcggcttgctcttgctgatgcacctgaagctttctacatttctgttaagcttggtgttgaaggcataggagaaatcctgcgaagatcaattgctgcagcattgtctgggttcagcaacagcgaacgacttaaccagcttttggcaaatataacagaaaagtttgacac

SEQ ID NO: 25 - DNA, 436 bp, Arabidopsis thaliana
ccacgcgtccgaggagctgtggttagagatgctggtggtttagggatgataatggcgaatactgctgcgagtggagaggagcttgtggcggatagtcatttgcttcccgcgatcgctgtagggaagaagactggtgatttacttagggagtatgttaagtcagattctaatccaactgctcttcttgtttttaaaggaacggttcttgacgttaagccgtctcctgtggttgctgcttttagctcgagaggtcctaatactgttactcctgaaatcttgaagcctgatgttattggtcctggagtgaacattttggctggttggtctgacgctattggtcctactggtcttgacaaggactctaggaggactcagttcaacatcatgtcaggtacgtcaatgtcatgcccacacatcagtggtttagcgggtcttt

SEQ ID NO: 26 - DNA, 436 bp, Arabidopsis thaliana
gaacgatcggggaaattcgagctcggtacctcgagcggccgcccgggcaggtccccgacatgcttaaggtcatggatcagaacaatgtcgtggcctgcaaaagtgcctgtgagaggttaatacggatcaatattgctgccgtggagctaacgataagccggaaacttgtcctcccacggattactcgaggatcttcaagaacgcttgccctgacgcctatagctacgcttatgacgacgaaacgagcaccttcacttgtaccggagctaactacgaaatcactttctgcccttaaaaatcgaagcttcgaggtagatatacagtctggtttaattatctctcacgtttcttttgcttattatgtacctcggccgcgaccggcgcgccggatccttaattaagtctagagtcaattctcgatacccgatccactggc

SEQ ID NO: 27 - DNA, 435 bp, Arabidopsis thaliana
  misc_feature (1)...(435): n = A,T,C or G
ttttttttttttttcaaattctggtcttttatttattatatatttcggatacatgagttataagttcttttaatcgatgtgggattcttattagaatgtctctctaagcattgaccatggttgcaaccgcggcttgctgaacaattggctcgagcttctcatctttgttgtcttcccataaatcaggtattgcttcctttatgttatgaatgctgcttagtgcatagtcagcacctggaactagcactgattcccccacaaacacggtttttagccctgttgctttagcactagcgatgttacgaatactgtcatcgaagaatatcgttttgcgtggatcaacaatgtctgcaatgcgaattgcagcttcaaatgcttcnnnngagggtttacagaggatttgagtgtttgaatcagaagaagggtttagtgttt

SEQ ID NO: 28 - DNA, 435 bp, Arabidopsis thaliana
  misc_feature (1)...(435): n = A,T,C or G
tttttttttttttttttttaatacaaaaattttgttatcattgaagtaaagttaacaatgattcgccaaacaaaaggaacaaatactagcagaaatcagatgataaataacggtcctggtaaaataacagaagtccaaaaaaaattccacaaagtaaagaaatttatcgaagtgtttcatcaatttcaagaaaacagaagagtcgttaatctgaatcaatacatcaatcaagctttcgatttcttccctttggtatcagcaactacgggcttggccttgaaaggcaaaaacgtctctccgcccataaacggctgcagaacctcaggaatgtcgacaccatcctctcgctggtagttctcgagaatgcagcaaatggtnntctctgttgcagtaagtgtcgaattcagcatatgcacatactgctttgtctgctca

SEQ ID NO: 29 - DNA, 435 bp, Arabidopsis thaliana
tttttttttttttttctgaaactggaataaagcatagaaacgtttcaagtgtttacaaatactactgtatatgacttttggagcattgctcaagaaaaatcacatacagatgcatgtaaataagaaataagagtttcattttcttattctgaacaatcatcataagtaatgtggctgtgctctgtacagctaacaacccggaagagaatgcttacttgagatgttcaacgtcctgcaaaaatcaaacttccccaggaagcatagtatctaccggaccaagatcacagtaggcaatgccctctccagtgaggtgtgcaacacatctcttctcagccaacagttccgcttccgacttggcgattcgttggcgaaggtagtcatcaatttctacatccttgacaagttcataatctccatctcccttcgaccggcatg

SEQ ID NO: 30 - DNA, 435 bp, Arabidopsis thaliana
agggttaatcctcagcaatgggctctcacctttccaaacaactcgagcggcgaaaagccatctccacggagaagaaagccctcaccgatctcgagaaatcgtgcggctgcgagtttccggggtgtgattacatgccttccgatcgtaaaaactggatggccggcgttcgacctgaaaagcttcacatcaacaagatcgtctggcctgggacgcacgactctgccaccaacaaaatcggtatccgattcgtgtctcgtccctttgctaagtgccaatctctctccatctataaccagctcgtggcgggtactcgagtccttgacattcgtgtccaagaagatcgccgtgtatgcacacggtatcctcaagacttatagtgtcgacgttgtcttggccgatctcaaacggtttctatccgaaacagagtcggagatt

SEQ ID NO: 31 - DNA, 435 bp, Arabidopsis thaliana
  misc_feature (1)...(435): n = A,T,C or G
aaagctgctgttggtgctcctgatcatctcggcgactgtaaccatcttctctttctctctctgtttttgttttgcattaagcttgattttgcaattcttagtttctgagctttgatcgttggtaaaattactaatttaagtgtttgtttgtcnnnttaggtccgttcanncaacgggctcttctcacactcgaggagaagagtcttacctacaaaatccatctgattaacctctctgacaaaccccagtggtcagtttctctcacgcctaaacccttaagatcggtctagtttgaacttgtttagccataatctctgaaattttacttgtaactggtacgagctttgtgttaaccggaaattggattggcttcatgtgcgagcattgtgttaaccggaacttgaaattggtggctttggttttatatatgatgca

SEQ ID NO: 32 - DNA, 435 bp, Arabidopsis thaliana
ccacgcgtccggtggtttctgtaatcgccggtggtgatggcttctaacgatccaaaaaacggcggcggtttcttcgcctctcttgcttcatccatcaccaatttcggatcggccatgagtaaatcagtgaacggtttgatgggatatgaagggcttgaagtgattaatccagaaggaagtacagacgatgcagaggaagaagcagggagaggaagatggaagcaagaggaacgtgatggctattggaagatgatgcagaagtatatagggtctgatgttacatctatggttactcttcctgtgatcatttttgaacccatgacaatgttgcagaaaatggctgagttgatggaatactcatatttgctagacatggctgacaaaactgaagatccttacatgcgtatggtatatgcatcatcatgggctatatct

SEQ ID NO: 33 - DNA, 435 bp, Arabidopsis thaliana
  misc_feature (1)...(435): n = A,T,C or G
tgagtacggcacagagatgaagagattcatagatatcttgtacgagacgcnngcacttttgggcactctgtttttctccgaccttttcccttatttcggattccttgacaacctcactggtctcagtgcacgtctcaagaaagctttcaaggagcttgacacttaccttcaagaacttctagacgagactcttgaccctaaccgccctaaacaagaaacagagagtttcattgatcttttgatgcagatctacaaagaccaacctttctccatcaaattcactcacgaaaatgtcaaggccatgatattggatattgttgtgccgggaactgacacggcggctgcagtggtggtatgggccatgacttaccttattaagtaccctgaagcaatgaagaaagctcaagacgaagtgaggagtgtgataggtgacaa

SEQ ID NO: 34 - DNA, 435 bp, Arabidopsis thaliana
cttttttttttttttttttttttagaagcaaatcctcttataaaaaatcatgttctttgtttttctggtgggcacaaaattaacatttttttattcagcataataatcacacaacaaaagcgaactctcactctctatgactctttatcttctcgagatttgcttacaaagcagtagcattttgcggctgctctatctggagaggttcctgcaactctggatttattggaaacaaatggcattgtgcgtattgcgccatcaattgatccacaagaactagagccaccattgcttccaccattggcacagctcgtggaacaacacaaggatcatgacgaccacgcgcaatcatttcggtttctaccttgtctctggttaccgtattttgcttccttccaattgttgatgttggcttgaaggctactctcatgttta

SEQ ID NO: 35 - DNA, 435 bp, Arabidopsis thaliana
ttaaagaacaaagagctaagctatacatcattcgaagatgtgtcgtcatgcttctttgttggcacgattgatcctcaatctgtcttcagatttcatcctcatcaatctttatgtataaaaggctttcgtgtgttggagggagaagagtcgtgatgtttggagcttaaccggcctggcggatcgggtttgattctacgcgagattgtggatgaatcggttaagagtttgacttgtttttgattagacctctctatatcgtttagcagattcttgttctttggagcaaatatggaaaattcaatgatttagtggaggagagggcaatattgtaaatatatttgacggtataatagagagagttgacaaaattttgtaatagcttttggctttgttctatgacatttgaaatattaaatgatttacaacagttaaatg

SEQ ID NO: 36 - DNA, 435 bp, Arabidopsis thaliana
  misc_feature (1)...(435): n = A,T,C or G
aaggaagtaaacgcagtctctgaggcattgcggtcaagatttagtgaagctttacaagcgggacgtctttctcagattgaggtgataccaaactgtagcatcttagctgcagtcggccagaaaatggctagtacacctggagttagttgtacacttttcagtgctttggcgaaggctaatattaatgtccgagctatatctcaaggttgttctgagtacaatgttactgtcgttattaaacgtgaagatagcgttaagnnnntaagagctgtacactcgaggtttttcttgtcaagaacaacattagcaatgggaatcgtaggaccgggcttgattggtgcaacattacttgaccagctgcgggatcaggctgctgttctcaaacaagaatttaacattgatctgcgtgttttgggaatcacgggttcaaagaag

SEQ ID NO: 37 - DNA, 435 bp, Arabidopsis thaliana
caggtacaaatgatattagtgtgactgtgggaggagtctgcaggtggggcagtaccatttccctttgaatctggtctcaggtgtgaggccaacgcatgtatagtgaaaccattcacctccttggcaattctcattgtcacaggcaatcatgtctccaaaggacacctgatggcagacacagtaagttggttcgtttggatcgattggctgctcttcaattggcataaggtctttccgattgcttcctggaggaggcatgagctcaaaatccctgtcacgatcccagtctctatctctataatcaatcttcttgggctgaggtgtgccatagaaggacttacgcttttccgctttaggaactataggtagtggaggaagaacagagggctcgtctggtggaatttttccctcttgctttaaatcttctgcaaaatt

SEQ ID NO: 38 - DNA, 435 bp, Arabidopsis thaliana
ccgggcaggtactgtaaagaaaatctagcagattttcgagtattcaggggctccactattggttgactagaattcaatagcttcatttcacatgaacctgaagatctgcgacgacctcttcttttagtatcagatcgtgatgttttcccagacttaccacccttactaacaagagaagaatccccaagtgacatttttgaaacacctccatcatccttgtccacattctcttgcttggtcaccaaatgaacaaccttctctttatgcacctcttcattatcatcctcatgcccagaatcaacatattcatccccatcatgagaatcaatcgcatcatcatcctcacgatccctatcaactccctcattgtttttctcatgaccacctttcccaagcgtagctttatactcagcttcatacatcttcaactcattc

SEQ ID NO: 39 - DNA, 435 bp, Arabidopsis thaliana
gaaaacacaaatctaccaaatggtataatttgtttttggtcttgaaggaagaatgcaagcaaaactggacagaatatatatcaactaagaatgtggaaagacacacgaatcacacaaaccaaataatagtgaacgctctttgcattttggcttattcatctagcttttccacttttgtgtttatccaagtgaggaaatgcttgtagaatgttataagccctgagatcttgccttgttaagatccctatcacaggtgacatccctgaagcttgaatcttgggaaccaccagtaaatgtctgagacccactgaccggaacagaaccaaagctttagccactgacatactttgcaccactgtgtaaggtgtagtgttggtcaaaggatgaagatcaacatacaattgcatctctgagcttgtgattgcaacatcatcg

SEQ ID NO: 40 - DNA, 435 bp, Arabidopsis thaliana
ttatcttgcaagtttctttagttttatagggaagggaaagaagggtcataacccattacatcacaccatactagagagtagtaataagagagacatgagctcaatagatgagcccacatcaacttttattcatattacattttgattaaagaagcttcattagttggggcagcaagtgcagttgacgcagctgcaagaggagccgcacttgcacttgcaatttgcgttgttctcctcggcaccaacgtccatgatcatggcctccttgtagctctcctgagtctcgacgatgtcgaaggtgtagctggttcccttctttacgcactgggtcttgtcagcacagtcgcagcttccgcagttgcttgacatgattgagtttttgaaaaggctttaaaggatgtttagttatgaagtgtttgacctgcccgggcggcc

SEQ ID NO: 41 - DNA, 435 bp, Arabidopsis thaliana
gaattttattaaacaaaagatacaagacttaaagcctacaacgattgtgcagcaagaaaattggagcccaacaatagcccattagaataacatctacagcaaaaagattcttaacgttggactcttatccgaaaacacgtgttgactttagaattcaactgtaacacatgccgataagtcatcatcagaaatttaacgacatcaaccttgccgtcgagaagcccagaatccggtgaagaaaatatcgtcgaaacatcgcacgaaatttttttgtttaccacctaaataacactgaacggaactcctaaagaacacaacataagggaatggttatatgcatcggaatattcttcaatctttcaaccaagaaataaccgcttgatagatttcctgcaaatcgaggtttccaaaatcacaagccagaattattaattt

SEQ ID NO: 42 - DNA, 435 bp, Arabidopsis thaliana
  misc_feature (1)...(435): n = A,T,C or G
ctttttttttttttttttttctgtgtgacacgagtgctgatttgaacataaaaggaaagatttgagttttgtattatgatctatctcgattcatctctgtataacaagtttattgtatatttgacaacaacacaaatgtgttgtctgattagagcttgtgcatgataagctgagcaccgaactgtgggtgaatggtgatgactgtgtatggtgcgtgaacataggaaggagaaatctcaaacgagaacctccgcagaatcaatgccattgccatttttgcctctaacagggcaaagttctggcctatgcatatcctcggtccccacgcaaagggaaagaaggagacttggctctttgttgccttnnnnngaccatctttaaatctgtcaggattgaactctgctgcgtcgtttccccacagctcgatgtcgtgtt

SEQ ID NO: 43 - DNA, 435 bp, Arabidopsis thaliana
  misc_feature (1)...(435): n = A,T,C or G
gaaattcgagctcggtacctcgagcggccgcccgggcaggtgactagagcagctaggcagattctgaaagattacattgaaggtaagcttccacattttgcaatgcctccagagataacccgagatgatgaaaacgagacagcggatgacactttgggagccgaaacaagagaaggttcacagactgagaagaaaggtgaagaagctcctagtcttggtcttgatcaagttctagatgatcttagctcgtttgatcttgcaaatggacttgtgtcttccaaaacgaaacagcacaagaagtcacataggaaacaatgattcggtcttgatggaacgccaattctgagagttttcctgaaaccgatcaacaaatgcnnnaatatatgatacagttgtggatttttcttattgtagaaatcgtgataacattctaac

SEQ ID NO: 44 - DNA, 435 bp, Arabidopsis thaliana
cctctagagcggccgcccttttttttttttttttttaataataatgtgtatatatattaataatgaaaacctttttttatcttgacagattaaagaagaagaaaaaaaacagagcattgctccaaaattcaatgtgaaggtaagtaagtaaataaataaaggtaaaaagagagagggggtaaaattagggaccacgaccagagacaaagcagaaacagccaggtctctgatcttccgggatcattccaccgcctttggtggtgtcgacagcttcaagcaaactcacaacttcctccatctctggtcgtttctccggattagcttcccaacatctcttcattatggtcgccaatgctgttggacaacatcttggaatatccggtctcagattctgacgaacaacagcagaagaaacatcagcaaagctgagatcag

SEQ ID NO: 45 - DNA, 435 bp, Arabidopsis thaliana
  misc_feature (1)...(435): n = A,T,C or G
ctttttttttttttttggaaaaggatgttaatggagttaacatcatcaacgctatttccaactcgctgtgttcatcaagttgttgaatgatgagataggaatatgaaaagggagaagcattgtgttgaggttttacgatgctccaaggatttcacttactcctgtgtttgctcagttgaaacctcaaaaccaggcggtataaacacaatgtcgtcccagtttgacgtcgtgctttccctcattcccttgacaatatcttcgaaaactgcaacctgaatatcgcctggtttcagagcagggttaagtcggttctgttggctggacgctcgtattagagatttttccaagtcctcctttctaaagaaaacannnnnataactcatgttttcacttcgtagaatcaagctctttgactggaaaaccggaacaccatgg

SEQ ID NO: 46 - DNA, 435 bp, Arabidopsis thaliana
  misc_feature (1)...(435): n = A,T,C or G
ttttttttttttttgcaaaattcaaatatcttgaaattcttagttatatagaggcttagagagagaagaaatatcactacttttatccctcgacgctgatcaacaatgacataaacaacagaacaaaccagtcaggaaaattccaagttcattcacataaccgaaagagccacctaaaannncgcccaaaacacattacttcgataccatttcacaacacccgttttgctagccacggacaaccttgtgtaaacccctaatctttcttcttgttcttcaacggcccaagtgggatcttgctcaacaccttctcatccaacactgcatactgcttcttgagctcgatcattgctttctcacctaatgggtcgactttgtcttcatacttgtcgtaggcaagaggaaccgtgaagagcaacacaagagctatgtatg

SEQ ID NO: 47 - DNA, 435 bp, Arabidopsis thaliana
  misc_feature (1)...(435): n = A,T,C or G
gcggccgccaaaaaacgcaaagtctaccactagacaagaaaatcgaagcttttcactttctcttttttctgnnntgttgtctttggttctactctccgcactgaatctttcgatcagcgataattgtttccttcttttgggattttctccttggatggaaccagctcaattaatgagatgagatgagaatgttcagcttgcagaagatggctatggcttttactctcttgttttttgcctgtttatgctcatttgtgtctccagatgctcaaggggatgcactgtttgcgttgaggatctccttacgtgcattaccgaatcagctaagtgactggaatcagaaccaagttaatccttgcacttggtcccaagttatttgtgatgacaaaaactttgtcacttctcttacattgtcagatatgaacttctcgggaa

SEQ ID NO: 48 - DNA, 435 bp, Arabidopsis thaliana
aatagttaaaactcaagttgatcaatcatcaatagcatgtgagcaataagtgtcaaaagagatacacatacacatcaaaccccaacaaaacaaatacattccttcatgtacactgattttacactacctcttcaaggaaatcatggatcataatgtctatcggcatctaagcaagtccacttaacatgtccaaagtgtgttggcttctacgtctaaagccgttccccaaaaattcaagattgattgacgtatagaacaggaacaagtcccgccatcttcccatctcttccaggccgcttcttctttacgtaaaaccagccatcaacttcatactctatctccaattcctcttctgccgtcaagtttagctcatcatctcctcctgctgtgaagtcatagagcgctgttccaaatcttgtaccagtagatttccta

SEQ ID NO: 49 - DNA, 435 bp, Arabidopsis thaliana
aaataaaagtttgaatctcaaaaaaagagctgaagactaacccgaatagtttagcaagcaatcctctgtgactgtgaaacttgtacaaataaaaaaaaaaactatatatattgtagaagaacaaatagtgacgatcgatttgattgaacgccaagcaattgatatgtgaaaagaaagaccagtggtggcttaatggttgagatgaccactctgctctctcttgtgacagagcacgagaagaccacaggctctgctattccttaattgtacaaacttcattcaccattatcctgtaacaccgttagagaaaacctccaccggtccaagcagtgtctgatttcccattgtgacctacagatttcttatcgcttgcaggctgataatagaaatcatcatctttagcatcattatcatcccaaccagcccaaccgccgt

SEQ ID NO: 50 - DNA, 435 bp, Arabidopsis thaliana
  misc_feature (1)...(435): n = A,T,C or G
ccgccatctttgttgatgatcctctctctggcatttgccattgaccaatacacttgaggggttaagctgttaacagataaaaccatatctcctgatttgatctcaagggcataagtcatgttgctcgaannnnnnctgctagtgagcttcatgccttctttgaaagcttgattcgtgatcagagtatctgtcggatgatcaaaactctcccagatcgaagttccgtcaacggaaacaacaacgagattcccggagtcacgcagctcgattcttgaagcgtttttgcctgaattatccaatctccaaacctcagttccttccatcaccacatttccgttgtcatcgaacacaaacttgtcggaattggaaacaggggaagctctgttcgcggaccagatcagtttcgtgctgctcttgtggatgatactgagtgtg

SEQ ID NO: 51 - DNA, 435 bp, Arabidopsis thaliana
acgggcggccgccattgtgatgaggactgtaagaaatattgttaacacagggcgaaccattgtctgcacgattcatcagcctagcattgatatttttgagtcatttgacgagcttttgttcatgaaacgtggtggagaactcatatatgccggtccacttggccagaagtcttgtgagcttatcaagtatttcgagtcaattgaaggggtgcaaaagatcaaacctggccataatccggcagcatggatgcttgatgtcactgcttctaccgaggaacaccggcttggagttgattttgctgaaatttacaggaactcaaatctttgtcaacgcaacaaggagctgatcgaagtactcagcaagccaagtaacattgcaaaagaaatcgagtttccaaccagatactctcagtcactgtatagtcagtttgttgc

SEQ ID NO: 52 - DNA, 434 bp, Arabidopsis thaliana
  misc_feature (1)...(434): n = A,T,C or G
ttttttttgtaagactcaaaaaccatttaagcaggattttccaacaaaaggctgaaaatggtttcttacaacaagatataactattacggtaaaataaaattaaaagcttgtctgttgtcgtcataatccacttttgcttaaaattaaaaacctttcaacacacaaaactttacacactctgttatagagaagacatgtaagcaaatgtggtttctgggtatccctgccatcattcctcaccaacttcgtcttcttcgtcatcatcttcatcagagtcaccttctttctcctcttcatctccatcatcgtctccatcaaagtcctcttcatcagcgtcattgttgaagtaggtgagagggttggnnnacaaatcttccttgatgatatctgcaacctgctcgtcttgcatctcatcctcaacatcctccttgtg

SEQ ID NO: 53 - DNA, 434 bp, Arabidopsis thaliana
gtccgcttcaaagcgtttcttactactaaagtggacaccacaagcttatttcataagaaacttcaaattagaatcagaaacaagagcatccttcttcatttacacaggtaaattaggtgtaaaaatggtgatgagaagtgtggatctacgatcagataccgttactagaccgacagatgcgatgcgagaagcaatgtgtaacgcagaggtggatgatgacgtcctcggatatgacccaacggctagacgtcttgaagaggagatggctaagatgatggggaaagaggctgctctgttcgtgccatccgggacaatggggaatctgatcagcgtgatggttcactgcgacgtgagaggcagcgaggtgattcttggcgacaattgtcacatccatgtttacgagaatggagggatatcgactatcgggggagtgc

SEQ ID NO: 54 - DNA, 434 bp, Arabidopsis thaliana
gatgaagatggacagggtattttacactttgttgcagcgcttgggtatgactgggccattaaaccggtgttagcagcaggagttaacattaacttccgtgatgccaatggctggtctgcccttcattgggctgcgtttagtggcagggaggaaactgtcgctgtgcttgtctctctaggtgctgatgctggggcattaacggatccatctccagagcttccattgggtaaaacagcagctgatttggcttacgcaaatggacacaggggaatttcgggatttcttgcagagtcttccttaactagttatcttgaaaagctaacagtggactcaaaggaaaatagccctgccaactcttgtggagaaaaagctgttcaaacagtctctgagcgaaccgctgctcctatgacctatggcgatgtaccagagaaact

SEQ ID NO: 55 - DNA, 434 bp, Arabidopsis thaliana
  misc_feature (1)...(434): n = A,T,C or G
aagagaaagagaaaaatcaataacctcatagtgtcgacatgggttgccaagacgaacaattgtgcaaacaatatgcgatctctacgaaaagatctcaaagcttgagagtctaaaaccatccgaagatgtcaacattctcttcaagcagctcgtttccacatgcataccaccaaaccctaacatcgatgtcaccaagatgtgtgacagagtccaagagattcgacttaatctcatcaagatttgtggtctagccgaaggtcacttagaaaaccatttctcttcgatcttgacctcttaccaagacaacccacttcatcatttaaacattttcccttattacaacaactatttgaaactcggaaagctcgagttcgaccncctcgaacaaaacctaaatggctttgtcccaaagagtgtggctttcattggatctg

SEQ ID NO: 56 - DNA, 434 bp, Arabidopsis thaliana
attttttgaaacttcttctcttttgcggtttcgtgttccactcctctcttcttggcccacgtgttcatcaatctctccctccgcatgtaatcgcttcgccgtcaatatcacatctttcttcttctttatctttaaaatctctttagatcgattcttttgtggattcttgaaatctccggagaaaaccactatggagacggcgactgaagtggccacggtggtgtcaactccggcggttacggttgcggcggtggcgacgaggaagagagataagccgtataaagggataaggatgaggaagtgggggaagtgggtggcggagataagagagcctaataaaaggtcaaggatctggcttggctcttactctactcctgaagcggcggcgcgtgcttacgacacggcggtgttttatctccgaggtccttctgctc

SEQ ID NO: 57 - DNA, 434 bp, Arabidopsis thaliana
cttttttttttttttttttttattttttttgaatacaacttaatcaacactcgaattgaacaaaacattattacacgacaattgaatacaagaggagagaaccaattggttttattttaacatatcgaaatagtcctcttacattattgaagagaaagaaaaataaacttgaacatcaactttaaaactgaaaaaaaaacatttcgaacttgacttaacttcagtagacgaattgcaaatcttgactatttgtttgattcatcctctgctttctcgaccttcgtcatgaatgtaaccggtttcttcgggtgctcatttacggtcaagttaaaaatatctggctttgagtaatgtccaaccacatcgaagtataacttggctcttgctatatcaccaagatcaagatcagctgtgacgagaccctctgattcata

SEQ ID NO: 58 - DNA, 434 bp, Arabidopsis thaliana
  misc_feature (1)...(434): n = A,T,C or G
aagctccacaaaaacaaaagaaatgtgccttaaaaaaatgaaatgaacttccatactaanaaaaaaagacacaatcttttatgttttgttttgttattggcctattcttccagatttacgttttannngaagttatttcccaaccattaggataatttctacatgaacagctcagactgcagcaacgtgtaataattagcagcttcgtcttcaagctcccaaaacgcatcaccaaacccatctaacaaactatctccataaacgtaaccgtcattagccttttcataattactctcgccaaaatctgtgttagggatcccaagttcgtcatcggaagcttccaaaagatgctgcatcactttctccttgctgtcatcttccacttcttcttcctttgaggaaacacatgaagaaaacgagtcttcgacgttgga

SEQ ID NO: 59 - DNA, 434 bp, Arabidopsis thaliana
aatatacaaaaactcttcgtaggctttctttatcaaaagtatcagcaccaatgagtttcattcaagacaaggatcataatgactaatattattgaaaaaggaaatgccaaatttgggtggttatctagggttggtgttgaggagacttcttgagatgtagggcttctttgagcttacgacctagagcaaatgccaatggtggagggactgcattcccaatctgcctgtgcttgtgatttatgttccctgcaaactcgtagctatccggaaacccctgagatcgggcgcattcacggactgtaaggattctgtgctgttcaggatgaaagcacattccaaccttacccatgggctgaggatccgtgacggaagtcggaaagtttccttgccaatctaatctcccatatagtcccttccaaccgttgtggcgctca

SEQ ID NO: 60 - DNA, 434 bp, Arabidopsis thaliana
  misc_feature (1)...(434): n = A,T,C or G
cggtcgcggccgaggtacaaacatgctccctcccctagagaaggctgtggaaatgctttcaaatactcgtggctctattcctatgatcttcttcgtaannntgggtctgttgaagatgagagacacatttgtgatgtaatgaagaaacatctagctagtgctggatcagtgtttcctcggatacacacttttgggttaggtgtattctgtaatcactacttcctgcaaatgcttgcaaatatatcctgtggccagcacgaatcagtttataatacagatcacattgaggaaagaatggacaaactgtttacaaaggctttatccaccattcttgttaatatagcaattgagccccttcaaagtctagatgaagttgaggtatacccttcaaatattccggatctgacgtctgcaagtccattgatgatatatgg

SEQ ID NO: 61 - DNA, 434 bp, Arabidopsis thaliana
cctctagagcggccgcccttttttttttttttttttttttttacaaacctcactcacataaatcacactaacaacgaagcaagagcaaacaatttctcatcaatttcgtggtaaatatatagttggtttaaccttgaaccggttttacaagcatgaagagtctgcacagacgagactttctttacatttttctatttttttggacaagagcttctcaaagagcctaattccatggtggagaagaggatcggtgcagagaagaagaagaggaaccatagttgaggtcaagattctgaatctgttccataagttgtgaccgtcgttccttgaagaaatccagacgagtggttagctccatgagagctgcagatgttgcaggaggatgatgatgtcttccgtagtccattaccggagaatactcttccattgggatg

SEQ ID NO: 62 - DNA, 434 bp, Arabidopsis thaliana
cctctagagcggccgccctttttttttttttttttttgacagttgaaagcagttattttactgaatttactgtacagttatagcaaccatggtattgttgtaaagatcacaagacaataagaatattgtcccacacatttgatctacatgtgaatgataatgattttccattaatctgctctccatagtcctccaccattgatgtatatcaatccttgtgtttcaactgccacaacctgctcttgaatgatctctaagccgattgaaatgtgacttccccggtggatgttcttacgtaagcagcagaagcttcaggagtgtcttcctcactcggtggaaccagttgccagaagagaggtagatacttttcccactcattcagaatcgttgcgcctttgctgcttccggttttttccacatgtgcttcaattaag

SEQ ID NO: 63 - DNA, 434 bp, Arabidopsis thaliana
  misc_feature (1)...(434): n = A,T,C or G
atcctctagagcggccgcccttttttttttttttttttttttttttaacacacagaacatttgagtttgttgtattaacaatatatcatccttctagtttgtcaagctcaacaaggaaatacaatggaagggaaagagagtcagaaaacaaaaaacaaaaatgaggatacaaaggaacctgagcgannngatcctgcagctgaactctacaacttatttggaatacaatatctatgctggtggaaatagatagtacaagcttgatgatgcttcaaactgctcttgatgcacgatgcccaccttttctcttattcgagacagatgtattgacgttgctgaatgatccgtttccatttccatttaagttctgattagccatgcattgtagctgatcaaaatcacaaccacttaacccttggtcattgatcgaggca

SEQ ID NO: 64 - DNA, 434 bp, Arabidopsis thaliana
gcggccgcgccatggagtgcgtttagccgcaactgtgatctctaacggaggatcaattatccatccgggagggaatttgctatcagcgcgtgcttctactcgaagccaccatagcagaacttgtcttccacagcttccaagaggctccaccattgaaggatccttcaacagagacaaaggactctccacaccttcattctcattcaacgacccaaagtccttaacccactctggcttattctcagcttcctcccaaagcaatctcgagttcaacacaaacccagaccactctagtttttgaggcaaaaccgcagcaacatcatctatataaactgcactcttccccgcatatggcaatgtattgaaaatatgccaaccaatcaactgatcagttgagttacaagcaggaccctgtacaggtaacgaagagctct

SEQ ID NO: 65 - DNA, 434 bp, Arabidopsis thaliana
cttttttttttttttttttttttttttttttttcattgaatatatatatgattcataatggttggtcacaattgcttttacagttcttctgtatctacttcgtgatatctttagacatttaatcaatcattacaaaacaaaaccaaaaaatcgaaacttgctgactcagtgtgattcacctgtgcaaaaccccccaattaccccagaatccgttaagttggttagtctcggaaatccaaatgtggaaatctcaataacccgattatgtaatcgtatgacccgacttggtctccgggtcaggatccgacacaatgccggtgatcgaagactctgaaaagcttcaactttttgccgattatttttacccttgaggagcaaaattccaattcaagaacggtttctgctcgaacgggtcctgaaacgactcgacgaaa

SEQ ID NO: 66 - DNA, 434 bp, Arabidopsis thaliana
cgaaagaatgagcaataatccacaaggaggattttcatcttagtcgacaatatttcgttgaatccaggttttttttggtttcattttaaaaagctttgtaaataataacacataatttacaggaattcctgtggcatttggcaatagagatggaaggtcaaactcatgatgctcaaaacaatgttcctgagcatgacaatccattgatgaatgtgaagaatccatcaagcaacttgttttctaagaaagatgcacaatgtttgtctgttttatgcaacgggaaatggttacagattgttagaagcagtcccaaagtatcatgtgaggcctctacttgtccaagtcatattttgaccaaagtaggagaaaactatgtggctgaatctgaaaagatgcataaaaaggtaatctctttctcgagcaaaaccttctct

SEQ ID NO: 67 - DNA, 434 bp, Arabidopsis thaliana
  misc_feature (1)...(434): n = A,T,C or G
gtacgatgaggagaaggaagtggatttggaggtgagaggagctattaatgtggtggaagcatgtgcaagaacagagagtatagagaagattgtgttctcatcttcgttaactgctgcaatttggagagataacattggaactcagaaagatgttgatgagaagtgttggagtgatcttgacttctgtctcaaaaaaaagttgtggcatgctcttgcgaagacacagtccgagaaggcagctngggcattagccatggatcgtatggtcaacatggtttcggttaacccgggcctcatcgttggaccatcagtggctcaacacaacccaagaccgaccatgtcttacctcaaaggagctgcacaaatgtatgagaacggtgtgttagcgtacgtagatgttgaatttgtagcggatgttcacattcgagcattcg

SEQ ID NO: 68 - DNA, 434 bp, Arabidopsis thaliana
ctcggcgaagaagtgaagtttccggcgatcagaggtgatatggataaggagaaggatcatgaagtggagtggcttgaagctcagaagatagaaataagcgttgacttattagctgcagcgaaacaacaccttttgttccttgaaactgttgataggaatcgatggctctacgatggtcctgcgcttgaaaaagccatctacaggtacaatgcttgttggcttcctttgcttgttaaatactctgagtcatcatcggttagtgaagggtctttggtccctcctcttgattgtgaatggatttggcattgtcacaggcttaatccggtgaggtataattctgactgtgagcaattttacgggagagttctcgacaattctggagttctttcttctgttgatgggaactgcaaattgaaaactgaagatttgtggaa

SEQ ID NO: 69 - DNA, 434 bp, Arabidopsis thaliana
tggaagtatgattgctgaagcaatgagcaaagtgggcaggaagggtgtggtgaccctggaggagggaaaaagcgctgagaacaacctttatgttgtggaaggaatgcaatttgaccgtggttatatctccccatactttgtgacagacagtgagaaaatgtctgttgagtatgacaattgcaagttgcttcttgttgacaagaaagtaaccaatgcaagggatcttgttggggttctagaggatgcgattagaggcggatacccaatcctcataattgcagaagatattgaacaagaagccttagctactcttgttgttaacaagcttagaggcacactgaagattgcagctctcaaagctcctggatttggagagcgcaagagccaataccttgacgatattgccattctaactggagcaactgtgatcagag

SEQ ID NO: 70 - DNA, 434 bp, Arabidopsis thaliana
cagtttcttctcaaagcttctctccacctgctgccacttcaacaaggagatctcattcctctgtcacagtcaagtgctgctgttcttccagaaggttgttgaagaatcctgagttaaaatgttccttggagaatctctttgaaatccaggctttgaggaagtgttttgtttcagggtttgcagctattttgcttctctctcaggcaggccagggtatagcgttggatctctcatctggttatcagaacatttgccaactagggagtgctgctgctgtgggagaaaacaagctgactcttccatctgatggtgactcggaatcaatgatgatgatgatgatgagaggcatgactgctaagaactttgaccctgttaggtactctggaagatggtttgaagtagcttctcttaagcgtggatttgcaggtcaaggc

SEQ ID NO: 71 - DNA, 434 bp, Arabidopsis thaliana
taaaccccagccatcgccgccaacacctgatctaccgtttgcgagctcattattaaagaaagtctatccagttctccaaagatttaaggatctagtcgcagatgataaacttaagtcttgggaaggccccgacatttgcaacaaatacctcggactcaaatgcgccattttcccgaaaacaaagcatctcgcactcgcgagcgtccagtttaatgggttaaacttgagaggcaagataggcaagatcctcaagttagataacttcctcgacaagttagaagaagtcaccatcttccacgcaaactccaacggtttcacaggctctgtgcctgatttcagcaatttgaaattcttatacgagctcgatctaagcaacaacaaactcacaggagatttcccaactagtgtcttgaaaggaaacaatctcacgtttc

SEQ ID NO: 72 - DNA, 433 bp, Arabidopsis thaliana
ggtaattttcaaaaggaagtgtagaatccatgataaacgaatgcatagtgaataatcgatgatatctggaagaaaacactctattgatatcacaatcactcaaggtaaagctcgtgctagaaattggtgcacaagctgaaaacagcttacagagagagcctgatgaaggaaaaaactagagagagatataaaagctaggagcttgcagttacctccgaaaagccaaacttctcatggaatttctttgtgttacagtccagcatttctctaaggctgcagtcaatgttgttctttttgacaagtttaaacctcgattcgaccttcttcttcaatccatggtgaaagaattcaggataagaagccacttcatccatgcctcttcccatcacctggacgaggaatctgatcctaggctgtagtgaattcttaacac

SEQ ID NO: 73 - DNA, 433 bp, Arabidopsis thaliana
  misc_feature (1)...(433): n = A,T,C or G
cttttttttttttttttttttgcaaaccaacaattactttaaagtaagaaaaaaaactgtttgtgtttcagtctcaagcttctaattnnntgacactgaataaacaataataataaaacatgtacacttttgggatattcatgttttttttgtctttctgagaagaaccacaaatcttctttctcctttctctatctgctctgcttcacttacttaccttttgttctgtttttctttttctccactgtattcactctgctgcatcagcaaccgactttcctttgttctctggttcccctgcggattctggtttcctcgtctccagaaagtgaagtcggtttcgcaaaatctcgaggtgggtttccagagattttctcatttcttctagcttagtctccgacatatttgcataggcatgagagttttcaacagg

SEQ ID NO: 74 - DNA, 433 bp, Arabidopsis thaliana
  misc_feature (1)...(433): n = A,T,C or G
ccacgcgtccgcataagactattacttagaagagaatcgatcagatatgattttagcgcatcttccaagattccatctctcaatcctcgcgaaaccttctttctctctctcttcttcgcatttcagtttcttaaaccctaagccttcggtaacagtatctcgaacccttttctcattcgcgtctaaatcgaatctcgccactgttgaacccataccattatcggtctcagattcaaccgatttggatgatgcacctgccgagattgcgctcgacaagctttttattccgccggagaccgatatatccggtgaagactcggcgagtttaacgacgaggatacttaagggttcgaatattgtnctgagcaagtacgcgagggacgcacaggtggttcaggctgattatgtgaagagtagtgtcaagacggaggat

SEQ ID NO: 75 - DNA, 433 bp, Arabidopsis thaliana
gtaaagttctgattctctcctttaggtttatctctcgttaacgtcgctcttggtcacgaggcgactctcactgtggagttcgatattcaggcaatctcaaaagcttccacgacaaaggtgtcaaatttggtcatcatgacggagtataagcaggagcaggaaatggagattgaagctcttgaagctatacttatggatgagtttaaagaaattcattctagtgaaagtgggcttaatacttcgaatcgatgctttcagattacagtgactcctcaggatgatgaactggaggaattagcaatcccaccagttcagctggctttggttttctcgcacacagaaaattacccggacgaggctccgcttttggatgttaaaagtattcgaggaatccatgttagtgacctcaccatcttgaaagagaagcttgaac

SEQ ID NO: 76 - DNA, 433 bp, Arabidopsis thaliana
ccacgcgtccgggatttgaattttcctcctccgactttgaacaattctcctttgttgaacctcttcgacgatacaacgccggaactgaagctacttccgtcgtctcgttcttctcgtccgaacactagtaatttacagagtgtatgcacactggacaaggtgaaatcagctctagagagggcagagagagatcctgctatgttcaagaaacgtcaatcaccggatgatacggtttacgatcattataggacggaggctgtagcgtcaccggtggttgccggatgtcctggttgtttatcgtacgtgttggtgatgatgaataacccgaaatgtccgaggtgtgataccattgttcctttgcctacaaatcctatgaagaagaagcctaagattgatctcaacatatcaatctgaatgttttggagtttatatt

SEQ ID NO: 77 - DNA, 433 bp, Arabidopsis thaliana
tcagatggacatagccttatgttgtctacctactggcgcagttgtcgagttatactcagcgtaaatttgctaagcggtgaagtgtcacgtgccagccctagtgattcagattattcatggaacgctcttgcgctagatggtgatagtattgttgctgtgtctagcagcccggcgagtgttcctgaaattaagtatggaaagaaaggtctcgattcagctgggaagccttcatggctctggtcgaatattcaaagcccgatcagatactctgagaaggttatggcagggctttcatctcttcagtttaaaattctaaaagtaccaattagtgatatttctgaaggtcttgccgaaggagccaaaaatcctattgaagctatatatgtatcgtcatccaagtctaaggagaatgggaaatgtgatcccttaattg

SEQ ID NO: 78 - DNA, 433 bp, Arabidopsis thaliana
tttttttagattattcgatgcttaaatctcgatactgaaacaacagagaactagtcttattcttcccaatctccaatttatagcttccccatagacgacagccactgttccatgttcttcccatcaggagcagcaggagagaagaagccattcggaatctgattccctgaaccatccataactttcttgtaaagaggaaccaaaaccacaaagccaccacaatcatcatcctcagctttaaaacctggtccatgtggctcaacccaaccaattgaccactctggatcatcaggttcaggaaacaccacattcccaatcttatcctcttcccctcctgatcctgatcctcctcttccaatccatcctctcttggtcttcttcactgatgaagaggaagaaccagtcttactagtagtagtcttcttcagtgaag

SEQ ID NO: 79 - DNA, 433 bp, Arabidopsis thaliana
aagctcagatcaggaagctaagggctcagattagagaggcagaagaagaaaagaaaggactgatcacaaagcttcagtcggaagaaaataaggtcgaaagcattaaaagggacaagacagctacagaaaagctgctgcaagagaccatagaaaaacatcaagctgaacttacttctcagaaagactattactcaaacgcattagctgcagcaaaggaagctcaagcgttagctgaggagcgtaccaacaatgaagcgaggtcagagttagagaatcgtctaaaggaggctggagagcgggaatctatgctagtccaggcgctggaagaattgaggcaaaccttaagcaaaaaggagcaacaggcagtgtatagggaagacatgttccgtggagaaattgaggaccttcaaagacgctatcaggctagtgagcg

SEQ ID NO: 80 - DNA, 433 bp, Arabidopsis thaliana
ttttatttattgcgaattggattatttttttatgtattattttatggaaaaaatatagctaggatatatacgacaatgttcgcaaggaaaaggtttacacatcaatcactatgaagagcaggttgtgtactttattatgtaaataatgtttgcaaagacactgccaatagatgtaaatgtgtatttaggttgtccccgtaagggatgcttgcaattcttcaagcgactgtcctttggtttccggcacgagcatccatataaaaagcaatgacaatcctcccaccatcgcaaatatgtaaaaggttccttgtgcgctccattcaaacataaagttgaaaccataactaacgaaccacccagtggtccacgatgttaatgcaacgattgaccctgctgaaacttttatatttatcggaaatatctcagacataat

SEQ ID NO: 81 - DNA, 433 bp, Arabidopsis thaliana
ccacgcgtccgagcaaaaaccgagttggagaaggctcacgttgttagagaagaagcaatcaagaggattaatgcaacaatgatggagatcacttgccactcttgcaagcaactatttcagctgcctgttacggctgatgagagtacgtcgtctcttgttatgagttacgtttcctcggcgacaactgaaggagaatgcgagtgatccaatgcatcttcatatatatatccgtatgaacaaaagaaagcaaataatgattttaaacgaaatgacggtattttttgtggatctgtatgagtgatcattttttactatatgcattgttttcttttgccactgcatatttcatataatgactgtaaattttgagaatcatttgaatttcgattataattcttctgcttagttttaaaaaaaaaaaaaaaaaaaaaaa

SEQ ID NO: 82 - DNA, 433 bp, Arabidopsis thaliana
tttttttttttatcaatgaagtcacatgaaactttttccttgagagaaccggttctggtcataaaatcctgggaaaacaaaagagaaaagaaaagaaaaaaacccaacatttcactctattagctagctgaacaacacagatcaaccactaatccttttacaatgacaaatacacaaatctttactcttctaaaattctgtttacttcaccatcatcttctcaggctctcgaagtgacctctctctctctctctctcaattagttgctaatgtaaccgttgcttcacacgtctcccatttaagtcacaaccatcagcaaataactcctttcgatgccctgatgatgttaaagagtgctcactcagcctagccacatactccaatagctcacttagtagggacgggcagctttccttcagataatcaaacccat

SEQ ID NO: 83 - DNA, 433 bp, Arabidopsis thaliana
  misc_feature (1)...(433): n = A,T,C or G
tctcttttttgaaatatggctttttccaaatctctagtgtttgttcttctcgctgctcttttgatttcttccgcagtggctcaatctccggctccagctccctctaacgtcggaggtagacggatctcaccggctccttcacctaagaagatgactgctcctgctcctgcacctgaagtttctccttctccttctccggcagccgcattgactccagaatcctctgcttcaccaccatcgccgcctctagctgattctcctaccgctgactccccggctttgtctccatctgcgatctccgattctccgactgaagctcctggtcctgctnnnngcggcgccgtttcgaacaaattcgccagtttcggatctgtggcggttatgttaactgctgccgttttggttatctaggttgttacgatcaatgaagctt

SEQ ID NO: 84 - DNA, 433 bp, Arabidopsis thaliana
ccacgcgtccgccatgaccaaattctccgagccaatcagagactcccacgtggcagttctcgcgtttttccccgttggcgctcatgccggtcctctcttagccgtcactcgccgtctcgccgccgcttctccctccaccatcttttctttcttcaacaccgcaagatcaaacgcgtcgttgttctcctctgatcatcccgagaacatcaaggtccacgacgtctctgacggtgttccggagggaaccatgctcgggaatccactggagatggtcgagctgtttctcgaagcggctccacgtattttccggagcgaaatcgcggcggcagagatagaagttggaaagaaagtgacatgcatgctaacagatgccttcttctggttcgcagcggacatagcggctgagctgaacgcgacttgggttgccttctgg

SEQ ID NO: 85 - DNA, 433 bp, Arabidopsis thaliana
gcggccgccacaaacgaaggagaattacattgacctattgaacaaactgaaatgtacaagagaagaaagataagcgttcattgacgtatacaagcacacaagtcctacagaaacatgagtagtactcaaatcagaaaccaagaactaaccattcaacacaaaatcttcttcttatcatttaaaacggccagatgtcagatccaccgggtttctccacaagaatccgattatactccggcctcgacgtcagatctttgaaaataacgtaggtaataagcatgaagagcacaaacaggatctcaaactcagctaatcggaagaaatagaacactgagtcaacaaaccgagtcagaagagagtcgtctctcctcataccgactcgattagttccagcacgtcgcccgatcatcgtcggtaaaattctccctccggc

SEQ ID NO: 86 - DNA, 433 bp, Arabidopsis thaliana
  misc_feature (1)...(433): n = A,T,C or G
ccaaattgcacgtgcctaggtgcacgccggcgggcccgacctatttaaatggtgtgatttcctttgttcacattgttcgaaagaaacgttaagcccgcttactattgagcctcacaaaatcggttctgtttagattagaagaaagctgaattttcagccgcttaagaggcatggcttgtagtggcaactgaggaaacggctgcgttggatgctgccagcaggtgaaaagttnctcatcctcctcttcaanncatgactnnncatactatttccacccaagaaacaacgacgtcgatatcgacacattctctgaatcccaccgatgaggaaagaacttaacacacaagtgatacgcaggcttccttgtattgttgagagtgatttttgtattgatgggagtgcttttatgtttaaactttttcatattaattgt

SEQ ID NO: 87 - DNA, 433 bp, Arabidopsis thaliana
tttttttggtttgtaaatttactcaagaccccaaaatcatcattgcactgtttggtctttgagttccaacaaaactctatgatatctcaaaagccaaaagaagatgtaacaaaccagaatgtacatcagacttatatcagaaacttttccaagaccaaaaactcatcaaagtttaaaggcaaaatgcaattaataacatctctctacttctttaaaagctgtaaaagatctttttcttcatcttctcattttctcttgcttaccatttccatatgttaatgctgaagaaatctcagaagttttaatcacacgcagcctcttcaccgaagacacaaacatttgccatggaacatctcctacaagcatcttgtctccttcattgtcttcatatgtaagagtatattctccattcccatctaataatccagtgatt

SEQ ID NO: 88 - DNA, 433 bp, Arabidopsis thaliana
cccgaattaggctttggctgatgggccgtaagagattacacatatacaaaaacgaagcggcctaaaacggaaaaaacaagcgcagtaaaatctgaagaaggcagtacaccggaaaacacgaatctcactttccatattcgatgctaacaagattcctttgcggacaagatcacaacatcaggattttgaccgaagctagtaaatccggtcgcaaactgttgtcgagaacataccgaacccagaactttcctttcgggaaaagcagatccgccacatctcagacccatgacctcttctcccaaacctagcaagaagagagacatcaaaactaacccttacctccctcgacaatctcccataaactacttcaaaagctaaaccaatcttcagatccggcaaagaggaagccaataacggcggaagctgatggaca

SEQ ID NO: 89 - DNA, 433 bp, Arabidopsis thaliana
  misc_feature (1)...(433): n = A,T,C or G
ccgcccttttttttttttttttcaaaccgatatcaacatttatagttccaatgggattcttttgatcaatttgaaacattgctactttccgactttcctttcctnnntactttttttgtgcactatagagttagaaacaacttctatcatctgccagaagcatgatagtgatgccactctctttatccatggcttaagnnntcagtaacctgatgcaccttacgagactctgagcttgagtactgtcccacggctcgggcataaggaattgattgtttcccggctgcaagcgcattcacattttcaactaaatactgtcttgggagcctcccgaccacattaccttcttcgttcccttctctatcgaggaaggcgaaatgaggaataccctcaacaccaaactcatccaactcttgctcccatttcgtgttgt

SEQ ID NO: 90 - DNA, 433 bp, Arabidopsis thaliana
  misc_feature (1)...(433): n = A,T,C or G
cccatccgacaaatggtggaacaacatggctgcatgaggatcgttctgtggagaaggattcagctgttgtttcaaaactgcgttcttgtggtgcaatcttacttggcaaggcaaatatgcatgagttaggcatggggaccaccgggaacaattcaaattacggaaccacaagaaacccgcatgatcctaaaaggtacacgggcggatcttcctcaggttcagcagctattgtagccgctggactatgnnnagctgctctaggaacagatggtggaggttccgttcgcattccttcagcactttgtggtataacgggactgaagacaacatatggtcggacagatatgacagggtcattatgtgaaggtggaacagtggaaataattggtccacttgcttcatctctggaagatgccttcttggtgtatgctgc

SEQ ID NO: 91 - DNA, 433 bp, Arabidopsis thaliana
cctctagagcggccgcccttttttttttgtaaaatactcactttatcatcaaatctttataattgtacatactaatggatttaaaaataagaggagaaataatttacgacgaaattggatttggaactaatcaagttttcgaggtccatccatgtttgcgtcgctccaacgtattcaccatttttaatttgtgttttaatcttctctgctaagctattagagctatccaagccattgtcatcaagcctagagacatgcttgagaagaggtccccatgaaaacacaaaatcttcaggggatatccaactatctcccaaaatcactcctccaagatgaagcttcaatttgccagattgaactgcgtcaataaccgataaaccgagcttaaccgcgattttgccaccataagattcagcaacaatgaagagagggc

SEQ ID NO: 92 - DNA, 433 bp, Arabidopsis thaliana
  misc_feature (1)...(433): n = A,T,C or G
cctctagagcggccgcccttttttttttttttttttttttacagaacaagcctgttcaattgatgacacaagcccgaaacaaaagacttatgtccacttttctatacaattaacaagaaccctaatacagtaatacagaaacaatccgatggtggaaaagaaggtaacctagctttgctattttaagagatgcaaanaaaaaaaaaaaagttggaagttgacaccacgatggctcccacctatgctaaatactttcacaatcgtggttaattaccggtatcagattcatgtcctgagctatcactgtcagagccactagaacccgagcctgagccactactagaactgttagaactacttgatcctccaacatttacttcttgtcgaacagtagatgccacatgacctaattcagtaacttttgacgattcaa

SEQ ID NO: 93 - DNA, 433 bp, Arabidopsis thaliana
cgttatcgcccctacgtcagctccatctccagaaacatgggtgcaggtggaagaatgccggttcctacttcttccaagaaatcggaaaccgacaccacaaagcgtgtgccgtgcgagaaaccgcctttctcggtgggagatctgaagaaagcaatcccgccgcattgtttcaaacgctcaatccctcgctctttctcctaccttatcagtgacatcattatagcctcatgcttctactacgtcgccaccaattacttctctctcctccctcagcctctctcttacttggcttggccactctattgggcctgtcaaggctgtgtcctaactggtatctgggtcatagcccacgaatgcggtcaccacgcattcagcgactaccaatggctggatgacacagttggtcttatcttccattccttcctcctcgtcc

SEQ ID NO: 94 - DNA, 433 bp, Arabidopsis thaliana
ccgaaaaccatgaactccaacgaccaggatccgattccgttcagacccgaagacaacaacttctccggttccaaaacctacgccatgagcggcaaaatcatgctaagtgcaatagtaatcctcttcttcgtcgtcattttaatggtcttcctccatctttacgctcgttggtatctcctccgtgctcgtagacgtcatctccgtcgtcgtagccgtaaccgtcgcgctacgatggttttcttcaccgctgatccttccaccgccgcaacttccgtcgtcgcttcacgtggacttgatccaaacgttattaaatctcttcctgttttcactttctccgacgagactcataaagatccgatcgaatgcgccgtttgtttatcggaattcgaagagagcgagacgggtcgggttttgcccaattgtcaacatactt

SEQ ID NO: 95 - DNA, 433 bp, Arabidopsis thaliana
  misc_feature (1)...(433): n = A,T,C or G
ccacgcgtccgaagtattgaacacaaagatggccaaagtgttgacactacttgttcttcgactactcatgaacctcttacttatcggttggatttctctctggatcatcaaacccacgaccatatggatacaatcttggcgtcaagctgaagataccgccagacacactttcttcggctattacggtctcaactttgccgtattttcattccctcctattgctctctctatcgttggactcatttacttgagtttactgccacaacatcatcatccaacaagaggagggaggggtgcagctattactgtctcaagaccagccattatcaatagcttcattggaattntntcttgtttcgagatacttgctcttcttttgttcctactctttcttgcttggaacttctatgcccgtgtctctaacgacttcaag

SEQ ID NO: 96 - DNA, 433 bp, Arabidopsis thaliana
agaaaaattgaggaaggaggaagaggagcgccgcaggcaggaagagcttgaggctcaagctgaggaggctaagcgtaagagaaaagaagaaggaaaaagtagagcttttttgggaatcagaatcatcatcgatggtgaatccaaagcgtggcaataggtttttcaaatacagaattgtgtaaattgctctctatcttcttctctttcaaattctcttccttttgttgtattcaataactttttccccactttgatgggctgcaaccacatattcttcttctatctttaacttttcccaccaaacttctccttttttttctttttttttgggttctgggtctgcttttttgttgttgttgttgttgaatgaaggtccgtaagggaagaagacagatgattgcgaaagagcaagacgaatacaaattacgccaac

SEQ ID NO: 97 - DNA, 433 bp, Arabidopsis thaliana
cgtttgagtgttcaaatttcaagctttttacaaggggttccttagattgatctgttactgtagagatggctccaactcaggatcccaacagtgtcggaggcggtgcgaagaaagatgaagctaccttgaaggttccgtctaaggatcccaagaagaaggacgagaaaaaggatgaggatttgtctgaagaggacttggaactaaagcagaaccttgagctctatgttgagagggttcaggatcctaatccggaattgcagaaggctgcccttgagagcatgaggcaggaaatccgagcttcaacaagttccatgacttcagttcccaaaccactaaagtttctgcgtccccattatggaactcttaaagcgtttcatgaaacaatggctgattctgatctcaaaaagtacctgtccgatatcctgtctgtcct

SEQ ID NO: 98 - DNA, 433 bp, Arabidopsis thaliana
  misc_feature (1)...(433): n = A,T,C or G
tgatccaagaaactgggctcgtctcgcttgcgtctgcaccaaattctcctcaattgttcgaaacgtttgttgtaaaactcagtgctactccgctatccccaccgtcatctccgatctcctccctcttcctccctccgccgccgcatccgcttcttcatccaccgcggcggattcgtctcttactcctcccggtggttgggcttctttatacaaactcgctgtttgttgtcctggtctcttccacgctggaattctcctcgaaaactccgatttcggtttagaacgtgagctaggtcccgatcaaaacctcgatccgaaacctactacgacggatctagctcttaacgacgaagaagtttnnaaaccagttggatctggnntagaaacgacttcgttttggtctctatatgatgatctctacacagatactatt

SEQ ID NO: 99 - DNA, 433 bp, Arabidopsis thaliana
acttgcagtcaaagaacttggagaagcttgatcagccatctcttgagttacagctggttgagaacagtgatcacgcccgaatgagtaaagaaattgcggacaagagccaccgactaaggcaaatgagaggagaggaacttcaaggacttgacattgaagagcttcagcagctagagaaggcccttgaaactggtttgacgcgtgtgattgaaacaaagagtgacaagattatgagtgagatcagcgaacttcagaaaaagggaatgcaattgatggatgagaacaagcggttgaggcagcaagtatgtgtcttaccctctctgttgataacaaatccctttcttttgtctaccattaacgtacacactcctaaatttaatccccagttgtctacaacacatatgtttgatcatactgtgagataaatgaataa

SEQ ID NO: 100 - DNA, 432 bp, Arabidopsis thaliana
ttttttttttttttttgacaatgaaaccttgacggcttttatttaacacaacaacaaagaacaatacaacaacacacagacaggtcaatcatttgttcaaggaattattcatgatcttcaagattccaataactgagaaggaagactactaatcagcttctgtctcaagaaatcctcataagcctcaactatgagatgatcatcgtcccacttatcacggaaagtgtctgattgtgtagcaagtctgtagtatccgccatttatttcctgatatctccattgttcaccgggcggtgcaccaatttgctctgctatccaattaaggtaatcaacctgacctccaccaagtcgatgtgtgtatctcttaggttgcccgaaagcctcacgctttgcatagtaggcggtaacgtcttccatcattcggacgcgtgg

SEQ ID NO: 101 - DNA, 432 bp, Arabidopsis thaliana
tttttttttttttttatataaactatctttctttcaccgaataatatatgcaaacgcaaacatcaaagttcaaaaacccatagaaaagcaaacccaccgattaactaaaaaaaaaaaaaaactcctttctcttttttgtttttgttttcacttttaagtttttgcaatgataacaacgatttagtttgactaaacaacgataagtaatataacttagtttgaaataaaagaaagtacttttaagagtgtagtagtcttgagaggaaatcaaataacaatcttcatcaaggcttgaactgattagtgccttgctcctcaacaaactcttcaggctgttcgttcatcaagttcttctcccacttggagttgtacggatccttaaaactgttctcctcgttgttgtttccgtacgagtacgattgctgttcgtag

SEQ ID NO: 102 - DNA, 432 bp, Arabidopsis thaliana
aaaaaatcttccgatcaattagactcggatccttatatacataaaatcttttctttctgtttttagataatgcacacacaaatctccccacttaatcgaaatcttccaaggctagcttcagcttagagagccatctcagcttgtaaggcagcgagttcatcttcctcagcagtaggttgcttctgagctggagcacgagcaggcttgtttccttgaggcacatggattggaacaggctgaagaagttgctcttctagctcagcgccttctagttcgtcaagttctgcttccaattcatcctcatcaaaatcattagccccaaatggagccgacaatgcttcttggatctgtttcatgttctcagtttgttcattgatctcatccattgtcttgtcaacatcatcaatgtttgttgctttctgcatagctttc

SEQ ID NO: 103 - DNA, 432 bp, Arabidopsis thaliana
tcgagcggccgcccgggcaggtactggctttatcgctccttcgtctcgtgtttttgggagaggtgttcttgttgaggacaagcgacagatcgcaaaacgttacttgtcgtcacatttcataatcgacattcttgctgttcttccgcttccacagatggtgattttgattatcattccacatatgagaggttcatcgtctttgaacacgaagaatatgttgaaattcattgttttcttccaatatataccgaggtttataagaatctatccgctctacaaggaagtgacaagaacttcaggcatactcactgagacagcttgggctggagctgctttcaatctcttcctctacatgcttgctagtcatgtgtttggtgctttctggtatttgttttctattgaacgcgaaacagtgtgctggaaacaagcttg

SEQ ID NO: 104 - DNA, 432 bp, Arabidopsis thaliana
gaattgttagaaccctataaataccaagaaggaaacaaataaaagcaaggccaatatgaaacatttttctcttgaaacctaagaagtcatcacgattttctgtaatttcccaaaaacacagagttttggatccatctagctagatagcttccggatcagtattccttgtctctacaaaatgatcactcacaatgtagaattgtcccaggtggtacctagcgacacaccgtgcttctttatgatcttcaccgcctcaagaaggacctcttgttgtgtattgtatagctcctcttttccctgagacaaatgaagcttcaggtgtcattgacaagctttggcctggctgttttaggatcaatttcaaccctgagaccaatttcacggagttgaggcacatccacagagcctttaatctccaactcagccactact

SEQ ID NO: 105 - DNA, 432 bp, Arabidopsis thaliana
ttaactcactgcgctctgctataattgaaacatttccagaaccaaacaggcgactactactgcggatgctaaagatgatgcatactatcacctctcattccagtgagaatcgcatgacttcatctgctgttgctgcatgcatgtccccattgctcttacgtcctctattggctggagaatgtgatctagaaggttttgacactctaggagataactctgcccagcttcttgctgccgccaatgctgccaataatgctcaagccattgtcacagcccttttggaagactatgggaatatgatcaatgatgaaggtcttgggagatgctccacttctactgattctcatattggcgacagtgggcctgagaactcaagtgatgaagaggaaatagtggttaaacatcctgacttgcatactctggatatagaag

SEQ ID NO: 106 - DNA, 432 bp, Arabidopsis thaliana
cgtccgcctaaacaaaaaaaaaatacattttctgatctctctaaaaatctttctccttcgttaatctcgtgatctctttctttttctatatatggacagaggatggtctggtctcactcttgattcatcttctcttgatcttttaaaccctaatcgtatttctcataagaatcaccgacgtttctcaaatcctttggcgatgtctagaattgacgaagaagatgatcagaagacgagaatatcaaccaacggtagtgaatttaggtttccggtgagtctctcaggtattcgtgatcgtgaagatgaagatttttcatctggcgttgctggagataatgaccgtgaagttcccggcgaagtggatttcttctccgacaagaaatctagggtttgtcgtgaagacgacgaaggatttcgtgtgaagaaggaaga

SEQ ID NO: 107 - DNA, 432 bp, Arabidopsis thaliana
acggagagctgtgcggctgcgaaacccaaggaattcgagagggaagttcgtgccatcgctaagcttcgtcacccaaatctcgtcagaattcgtgggttctgctggggagacgacgagaaacttctcatttccgattatgttcccaatggcagcctcctctgtttcttcaccgccactaaggcaagctcaagctcatcttcttcgtcgtcattacaaaaccctcttacttttgaagcacggctcaagatagcaagaggaatggctagaggactatcttacatcaatgagaagaaacaagtgcacggtaacatcaagcccaataacattctcttgaacgctgagaatgagcccatcatcaccgatttagggctagaccgcctcatgacaccagcgcgtgaatctcacaccactggaccaagttcgagctcaccg

SEQ ID NO: 108 - DNA, 432 bp, Arabidopsis thaliana
  misc_feature (1)...(432): n = A,T,C or G
ccaaattgatatttatctcttctcaaccatggcgatgagacaagccgctaaggcaacgatcagggcctgttcttcctcttcttcttcgggttacttcgctcgacgtcagtttaatgcatcttctggtgatagcaaaaagattnnnggagttttctacaaggccaacgaatacgctaccaagaaccctaacttccttggctgcgtcgagaatgccttaggaatccgtgactggcttgaatcccaaggacatcagtacatcgtcactgatgacaaggaaggccctgattgcgaacttgataaacatatcccggatcttcacgtcctaatctccactcccttccacccggcgtatgtaactgctgaaagaatcaagaaagccaaaaacttgaagcttctcctcacagctggtattggctcggatcatattgatct

SEQ ID NO: 109 - DNA, 432 bp, Arabidopsis thaliana
ttttgagataaaaacgttataataagcaacgtgtcgataatctcatactcttacaatcacgcaaaagggtcttgaaactgaagcaaagtacttaacttttaagtaatagaaagcaaacaaagaagtgatcaggctccataatcaccctgttcaaacttgtcttcagggtaatacactgcaacgacttcatttcctccaaatttcctaccattcatcccgaatcttgccctagtcgagccatctgtatcggcatacttcaaaaacaccttgccaaggcctgccactggctcaccattggggcttggacgcggaatcacaacattggtcaaagcacctgcattttaagagttaaagaacaaaacatttcgaatacaagacaagaaaacacagacaaaaacaagtcagttttttcttttaagaaatagtggccag

SEQ ID NO: 110 - DNA, 432 bp, Arabidopsis thaliana
gcggccgcctgatttagaatgggttagagatagaagcaggttctaagagtattaacacccaaatacatgaaaaaagaaaacacactccatgattatttctgagctcacaagttgtgaaaatctctacttagtcactgctgtctgaagaggagagtgaatctcgaccacttccttagcctcaatttgcttctctgcaactgcctccgccttggagaagctcccgaatatcttgtccatggtgtttttgaaacaagtcttgtgttcatccattgaggcatgtatgaattcatccatgtgatccttgaggtttgcaaagaaagtggcgttatcatccttcaccctcttcctgcatgatgatgcaggcacttgcggttttggcgggttctcggtttcgattttcttggtatccaccacggtttgatttggcggccg

SEQ ID NO: 111 - DNA, 432 bp, Arabidopsis thaliana
ttttttttttttttttttttcggtcttaattgatattttattgaagcataagatagaaacgagacacacaagagtagagtagtctgttgctcttaggaaatgtcaataccgataaaagacgaaagtcacaagaacacatagattaaagcagagaggacccatatagtcatttgctggtatcgaggacacaacgaaggcaagtaccttcgtgcaatagatcgaaagccttattgatttctcccaaggtcaagttgtgtgttatgtattcatccacttttatctccttgttcatgtacttttctacaagccaaggcacttgggttcgactcttgaaaccaccaaaagctgttcctttccacacacggccagtcacgagttggaacggacgagttgatatctcttgtcctgatgctgcaacaccaactatgaccg

SEQ ID NO: 112 - DNA, 432 bp, Arabidopsis thaliana
aatgagaagaataccaaactcttccacattatctcgatttcaaatattacaaaacttattttgtttgtgggtcttctcaaaccgctgcaacatgttgcttgaagtcttcctggtattaatgacaaaaatcctcaataaatatgaaaattacacaaatgtcatcaaatatcttgctaatggtttggtccggatcaggtggtagtaatgttgagcttgttgacccagtagccaagttgctcagcaacacagtttgatcctgttgacccataggaactgaacttattgactgaattttcaacccccaaaaatccaaacacatcttcttcaaacacagggctcagctttttcatctcttcaagacttaagttctgaagttcacagccttttgagacgcaaactccaactagttttccaactatgtcatgagatgac

SEQ ID NO: 113 - DNA, 432 bp, Arabidopsis thaliana
gcggccgcgccaattgcagcaacatgttatatgcattcttatacacaacaattccaatttaagacactcacacacaaaaagttaaccaaaaacaagtcaagaacgtaattccatcaagctactggaaagttgacttgtttatggacgatcaagccatataaaacactctgccttgttctgattgcttgactagcttcataggtttgactcgtgcgatatatactctcaagaacaaacccaggagaagagaagctttaaaaaaaaaactctttaccgatatcttgtaccagagctctgtccttgagttcttgtagatggatggttattgctcgttttgcgatactttgccaattcgttattagcatgggaaagaagcttctgagcgttttccagtctcttggtataatcagtatcagcaagtttaaatgacgc

SEQ ID NO: 114 - DNA, 432 bp, Arabidopsis thaliana
ctttttttttttttttggtgaaaaattagattaattatgataatacacaataataatactataccatcaaatctgaaacgtagttccaaaaataagtaaccccaaaatcaaaacagaaagaaaaaaagagaaaatgatgagttcgtagagttttttatcagaaacatcttctggtgtttgttgttttttactctccttcttttttcttctatatgaccaaagtagtaagtactaagcatcatcttccttaaccctagaacttgaacctgacgtcataccaatcacttgtgtatgcgtaaatctttgcaactgtatcattcgcgcgtagattccatcaggatggttcttgagaagatgcgaatgcgatccttgttcagccacttttccatcatcgatgacagcgatcacgtgtgcgttcctgcggacgcgtgg

SEQ ID NO: 115 - DNA, 432 bp, Arabidopsis thaliana
gcggccgcgcttcgtctcgtcaatggcggccatttctgtaagttcttcaccatctattcgctgcttgagatcggcatgttccgattcttctcctgctcttgtatcctcgacgcgtgtatcgttcccggcgaagatttcatatctctccggtatatcttcgcaccgtggcgatgaaatgggtaagagaatggaaggattcgttagaagcgtcgatgggaagatctctgatgcgtctttctccgaagcttcatctgcgactccaaaatcgaaggtgaggaagcacacaatttcagtatttgttggagacgaaagcggaatgattaataggattgcaggagtgtttgcaaggagaggatacaatattgagagtcttgctgttggtctgaacagagacaaggctctattcaccatagttgtctgtggaactgaaag

SEQ ID NO: 116 - DNA, 432 bp, Arabidopsis thaliana
  misc_feature (1)...(432): n = A,T,C or G
tttttttttttttttttttttttaccagtcggagccatagcttacaaagtcttaagttcattacaaccatcgaccaaaaggcttacaaagtccaaagttcttaagttccttagctaattctcacacaagaaacaaaaaaagaagactaataagaaccagaaacatagatgagaaacatatatcctacgataaannncaaaagaggcattacatctccattaaacctaaacaatccaagtccttcttcttagatagtttcagcaatcacagaagccacctccttcaaaacatctatcttctgcgacaacaactcaagttccttagcctccaccatcttcatcttctcttcaatcctcttcttagtctccttagacaccttactccatttccacttcacaatacactcatccacaccaagcctcgcaacaaccc

SEQ ID NO: 117 - DNA, 432 bp, Arabidopsis thaliana
  misc_feature (1)...(432): n = A,T,C or G
cctctagagcggccgccctttttttttttttttttttaacaatgaaattttgtgaaactacaattaaaagttcaaaggtattttttttttttggattacaacattaacctatggagtctgtagccattttttaatttaacttttggcccaaataatacttctgccaagtctatacaagaacaaaaacttgaactctgttagagcggtgagaaatgtcttgatttgaagctgcataatctgtactggtttactctgtctggtcactgacacggaatagctcgatgagcgtgnntcggattttgattctcagagcagaggcttcatcgggtctaaaccacttcttgtcgnnnattcccaggtctttccttttcagcctttgaggcgcctcttcaatgaaccgtttaatgaagaagagcacaaacggaccacaat

SEQ ID NO: 118 - DNA, 432 bp, Arabidopsis thaliana
  misc_feature (1)...(432): n = A,T,C or G
tttctgtgagattatttcgtgttgatttcaaacttgaacaagaaaagtggatagatattgtctcttgggttgaagccaaagaaggaaatgataatatatacatacacacacacacacacaaaaatcaaagaaggaagttttataggattatatatatagctagagagtctcatttcttgtatgtttctgtttaatcttctcttttgtctcctttttttatcagtatatgtctgtatgtatttatatatatagatctgaatatagtttgtcgatttctaacttatttcgcctcttcttattctttngntttttgctttaagtttnnnnttttgtgtgatgatgaacaaagacatgttacttcaccagcatcagcaaccacaacaagacgagaatatgtcgaatctaacatcagcttccggggatcaagcaagt

SEQ ID NO: 119 - DNA, 432 bp, Arabidopsis thaliana
  misc_feature (1)...(432): n = A,T,C or G
tttttttttcttacaacaaattcagattttattcgaggactcactgtttttttttttttctttagttacacccaaatatacaaataataaaaaaagaaaagagattatgacacaccattacttactttaatcacaacataaataactatataagaatttatttatcaaaggagctttaattacaaagctcaattcacaagtccagggtcgaaactaacgcccgttgacggcaaccatatattcccgtcaataaaactcgccacagtgaatttttccgcttccgtcaccgtcaaagacggatgacacccactccatttaacccgacccgaaanngatgatccaggacccgaattnncatattctccgtaaaacagagatttgagaccgaaaccacccgaccaaggagaccaacccgacggatgaatcgacccg

SEQ ID NO: 120 - DNA, 432 bp, Arabidopsis thaliana
  misc_feature (1)...(432): n = A,T,C or G
cgtcgcatgcacgcgtacgtaagcttggatcctctagagcggccgccctttttttttttttttnnngtaaaaagcaacctcaaaggtcagaagtaaaattattgagattttacagcacagttttggtaaatattaaagcacacggcatcagagattctgcaacacaaacaagaaataacatcactaaaaaccagacacacattggcactaatttctacgctctctctctctctaaaccgaagataagagattctctgcagacaagacaatatagaatattaattgnnntctctctctcaccctctctctttctctttctctctctccctattaggtttcattgaatctaaaacggaaaatcctcgggattacttgccagtaaagaaagggtttacatatagttgaattggtccgaaactgaggcgatgatta

SEQ ID NO: 121 - DNA, 432 bp, Arabidopsis thaliana
ctcctttggaacaaaccgcaattgagccgagttcgtgtagcgtgttcttcttctcaatctgactcaagacctgagaagaagcaatcggataagagtaactatgctcgagctgagctgttccgtgggaaatcaggttctgtttctttcaatggtctgactcatcagctggttgaagaaagtaaactggtttcagctccgtttcaagaagagaaaggttctttcttgtgggttttggctcctgttgttttgatttcttcgttgattcttcctcagttctttctaagtggtatcattgaagctaccttcaaaaacgacactgttgctgaaattgttacttctttttgctttgagacggtgttttatgctggtcttgcgatattcctgtctgtgactgaccgagtgcagaggccgtacttagacttcagctccaag

SEQ ID NO: 122 - DNA, 432 bp, Arabidopsis thaliana
  misc_feature (1)...(432): n = A,T,C or G
aggtgaaagagagttcgcaaacgaagttattgttgtggcaaagcttcaacatagaaatttggtaagattgctagggttttgtttggaaagagatgagaggatacttgtctatgagtttgttcccaacaaaagtctcgactacttcatttttggtcagttatgttcaatatttagcctaagataaattttttacaaattgcataccattcattgtttctaacattgtaaattcatatgnnnngactctaccatgcaaagccttctggactggactagacggtaaaaaaatcattggaggaattgctagagggattctttatcttcatcaagattcacgactcacaatcatacatcgtgatctcaaagaaggtaatatcctccttgatgatgatatgaatgcaaaaatcgccgactttggaatggcgagaattt

SEQ ID NO: 123 - DNA, 432 bp, Arabidopsis thaliana
acatccattcatgggaagcatttgacaagggacaggacatgcatatgcaagcggctccttcccaagctgaattgctctataagagctttcaggttgcaaaggagaaactgaaatctcagacaaaggacacaatcatggacaagtacgggaatgcagctacagaagatgaaattccaatggagcttttacttgggcaaagcgaaaggcaagttgagtatgaccgagcagggaggattataaaaggacaggaggtgatattgccaaagagtaaatatgaagaagatgttcatgctaacaatcacactagtgtgtggggatcatattggaaagatcatcaatggggatataaatgttgccagcagatcattcgcaatagttactgcacaggttctgctggaattgaagctgcagaggctgcccttgatctgatga

SEQ ID NO: 124 - DNA, 432 bp, Arabidopsis thaliana
gtcttgaaatggagagttacttaacgaaatggtgtgtagtgcttgtgttgttgtgtttcgggtttagtgtagtaaaagcacaagcacaagctcaagttccatgtttctttgtttttggtgactctttggttgacaatggaaacaacaacggtcttatttctattgcaagatccaattacttcccttacggtatcgatttcggcggccctaccggccgtttctccaacggcaagactactgttgatgtgatcgctgagctacttggatttaatggctacattcctgcgtacaatactgtgagtggtcggcaaatactctccggagttaactacgcttccgcagctgctggaatccgagaagaaaccggtcgacaattgggacaaaggataagctttagtggacaagttaggaactaccagaccacagtatcgc

SEQ ID NO: 125 - DNA, 432 bp, Arabidopsis thaliana
  misc_feature (1)...(432): n = A,T,C or G
ttaaactcactatcttcccaatttgatgattcagtgattcaaattcgaaacttcaagcaatgttatcgacattgcaaccgccgcgttctctatcactcctccctctacgccggttccaaatatctaaaaccatcgtctccgcagcttcttcgaagaccatcgacacttccgttatctctccaccacaatctcaaattctcaccactcgtcgttcactcctctccggcgaaaccacagctgtcgaaatcgcaaaatcttacctttctcgtatccgtctcactgaacctcagctcaaatgcttccttcacgtatcggagaatgttctcaaagatgctcaagagattgatcaacgaatcgctaaaggtgannaattgggtcctctcgccggagttttgatcggcgttaaggataatatatgtactcaaggtatgc

SEQ ID NO: 126 - DNA, 431 bp, Arabidopsis thaliana
tcgagcggccgcccggcaggtacacaacttttgtaaaaatcggcgtaatcatgttctagctcgtagaaactattcaaaacaactcccgagctcttcacttccgattccctaacttcagtcataaactttcccatgtcggattctccatcgccatctatgatctgttcttcagttatcacaatgttcccagggagctcgggaatcacaaatggctcagagcttgaagccactctcttctgtggtttatgcactccgatgcaataaccagcgcataaagagaagtagccagtgccgtggaacacaagtcttggcacattgaacttctcagcaactttagtggaccaagggaagaacatgttaccgacaagacagtctggtctcattgtcacgaggagctcctctagtggctcttcgaaatatttcattgcgag

SEQ ID NO: 127 - DNA, 431 bp, Arabidopsis thaliana
agcggccgcccgggcaggtgcaactatcaatcgaatcagacattgacgaggagctttggtcgtaatccgaggaagagattaaaatcggaaagtgcgaaaatgccggtcatggagaaattgaggatgttcgtggcgcaggaaccagttgtggctgcttcttgcttaatcggcggtgttggactatttttgcctgcggttgtgaggcctattctagactctctcgaggcttccaaacaagttaaagctcctccacttaccgatgtgattgctggtgtcacagggaagaaacagagttaaaacaagcaatgacttcccctgttttcttacattcagatgatccctattccttttttgtcttttactctctctattcacaatgaataagccagactcatttgtttgttatgaaacttaatataaaggcatgtgtg

SEQ ID NO: 128 - DNA, 431 bp, Arabidopsis thaliana
gcggccgcgctcaacgaacgacttcgctttcgcagtttgcattgaattgaagcataagcaacctccaaattccgacaacaaccgatttcctgcagagagagtctctctttgtttgccctggataggaaacctacactactctttgtgatttgattttgttatctgaattcagagtcttgcttctgggttttggtctgggttttggaggtttagtgcttgaatctgatgttggttcaagatcgtgtggctcctaagccaccaaaatctcggatcagagaacttcctagtcgggaccgattcgctgaacccaaaatcctagatttctcttcatgggtttccgacaatgtctacagaatcgtaatcatcttcctcttcatcgtcaccgtcgctgctttcttcttcctctacaacaccaccgacactgcttctct

SEQ ID NO: 129 - DNA, 431 bp, Arabidopsis thaliana
gataagaaagaaagaagaggaagaagatagtcatgattcatgaagaatattaaaaagcaagtcatcaacaacacttgaaaacggcaataaacataaggaagaagaaactggttgcttgctgcttttgattcttctctctgaagatcaatcattcaaaagcccattggttctctctgcgaacctcttcctcttcctctggtgtgaagtcgttcttaatgttgaacgttgtgcggatctcttctggagtctttcctttgatcatatccgcaactgtctgacatgttagatcaagcaagttcttgatattcaggtaattagcagccagaatgagttcaaagagagtagcttgatcgatcttcataaaatcagcgtcccaggccttaagatcgtcatcggaggtagcagcaccctcgacggcctcggccttagag

SEQ ID NO: 130 - DNA, 431 bp, Arabidopsis thaliana
ttttttttttttttttgattcgaattatatatcaactattaacaataatggagcaatacatttaacgttgatacatgatactctgttggcgttttacaaatcctagagagtcaaaaccattatccaatcgctggcttgtttcctactttgcatctctcttctcatcatcatcaatatcctttatagcatcctttgcaaggcttgtcacatatgttccagccaatgcagtaaccaacagacccaccccgagagttaaaagctggccgtttcctccaggcaagccaacattagattcttcttgaatgattgctcgtccaaaagcaccggcgctgacataagcccaagagcctggaagcatacccaaccagcttcctaatacataaggcacaaatttcaccgacgtcaacccatacaggtaattgccaagagag

SEQ ID NO: 131 - DNA, 431 bp, Arabidopsis thaliana
tctattatacggaggacgaagaagatgtatgagcagcagcaacatttcatggatttgcaaagcgattctgggtttggggacgatagctcctggctcgccggcgatgacgatcttcgtctctctcctcaccaatctgccgccggtacgaactccggcaatgagaatctagatcgtcgtctcttaaaagatctcgttgagatggttccccttatcgagcattacatggaacataaagaaaggagttcgtttaagcggcgtggttccatgatctacactaagatgccttcaaaagaatccttgtcccgaaggggaagaaatgcttctcaaacagtcccaggaagaaagaagagagaccaagagggaaatgacgatgttatgaacaattctagggaagatgatgaaaacgcaaaggctttggctggtgcagaaaa

SEQ ID NO: 132 - DNA, 431 bp, Arabidopsis thaliana
ataatcgaatatggcggaactaaagctatcagagagtcgggacttaaccagagtcgagcgaatcggcgcacactcacacatcagaggactaggtctcgactctgccctcgagccgcgagctgtttccgaaggtatggtcggtcaagtgaaggcgcgtaaagccgccggtgtaatccttcagatgattagagaagggaaaatcgcgggtcgggctattctaatagcgggtcaacccggaacgggtaagacagcgattgcaatgggtatggcgaaatctcttggcttggaaactccttttgcgatgattgcaggaagtgaaattttctcattagagatgtcaaagacagaagctttgactcagtcttttcgtaaagcgattggtgttaggatcaaagaagagacagaggttattgaaggagaagttgttgagg

SEQ ID NO: 133 - DNA, 431 bp, Arabidopsis thaliana
  misc_feature (1)...(431): n = A,T,C or G
catcgcttcaacgataccgtcttcatcgttcctcttgaatgatcgcacctttgagagatcgaacttgccgtctacgcgcgcggagaagctgatccgtgagctaaaccttttcccgcagcaggatctgaatgtgatcgatgtcgctgatttgcctctcactgctgcggagggaccggggattgttgaacggaagttcgtattcccgaatatacttgccgatggtggccctactgtcgacgatttaggtcatcatgctggttattacaagctcccgaaatctcgtggcgcaagcatgttctacttcttcttcgagtcacggaacnnnaaggatgctcctgttgtgatttggttgacgggagggcctggatgtagtagtgagttggctgtgttctatgagaatggtcctttcaagatcactagtaacatgtctc

SEQ ID NO: 134 - DNA, 431 bp, Arabidopsis thaliana
ctctttctcctcctcctcctccattgaagaagaaacctaccttcgtaatatttcctcaattacgatcatggggaatgttaaagggtcaaccaaaaaatcgaatcttgatcgattccttcattgcataacacccttagtgccaccccaatctctccccaagacggagattagaaccctaaatcgattgtggcatccatgggagagacaaaaggttgagtttttcaggttgagtgatttgtgggattgttatgatgaatggagcgcttatggagctagcgttcctattcatgttaccaacggagaatctcttgttcaatactatgttccttatctctctgccatccagattttcacctctcattcctccttgatccgcttaagggaagagtctgaagatggggaatgtgagggtagagatccgtttagcgatt

SEQ ID NO: 135 - DNA, 431 bp, Arabidopsis thaliana
aaaaaaatttggcaaagcagttaagttcaacaagagaatagtactttgggtaaaggaatataagttgtaaatattacagaaaaagaaaaaacgtaaaacaaacctacaaataaacacacacagaggctacaatacatgaccacaaaagcttctggaggagcttctttctgcctattattctttccaacatggtggttagaacaagtatgtatcactaaccctacaagtctcacatttttaccacatatacaccacagcaatccagagaccaccaatttttgaggacaatcaccgcaatttcttctacattacggcatacggcaaacctatattgctgtcctcgagattgacttacccactttactcttccaagctccaagagtctcattgtcagaagtctcagcattctcttcagcttctcggacgcgtgg

SEQ ID NO: 136 - DNA, 431 bp, Arabidopsis thaliana
cttttttttttttttttaaaataaatgttctcaagtaaacgtcttgagagttttattcattaatatatatgtattcttgtagccacatattgggtaaacaattctcacatagagctaacaaagtcaacgatatccaccacatcatggagcagagagttggagttcacaactctacagttcaatctgatttgtccttgagttcctgtagttggtgtaatgtttcccatcctattcattgcctccacaaatgcattgaagaatgtttgtgtgccatcagcatatgctctcaccaaggggattgtgtcagtggcattggggctagagaacaactcttggtcgctctggataagaccttttcgctctttgagattcacgtagtatttgttgtcgaaaaccgtaggcgtacgtagatcaaaatctaccaaggcact

SEQ ID NO: 137 - DNA, 431 bp, Arabidopsis thaliana
tttttttttttgttttagatcgtaatttcagatgttgtcatgatttgagtaaattgagaagcacacaatttagaacagaaaaagcaacgtgacaaccagatttcagacgagacattacatatagtacaatgagaagaaacgttttggatcactgagcatagcaagagccaggtcccaaggggggtcttcgtgcgtaaaagttatccactggagccgctggaacgccacggttattcagtagacatctgaagtagtgtagacgtggcaatgcggttaacgttatgttcccctttgacacggcctctctggtgctccacatccgttctgcagctgctgcagcacgaggccaaatggtctgaaggacaacggatgtatcagctgtttcaccccacatgcaaacttctcctccgatgacaagcttttggagagaa

SEQ ID NO: 138 - DNA, 431 bp, Arabidopsis thaliana
ccacgcgtccgcaagcatcattttcccgagaaaactatgaattcaaacattttcccaccatcgaaacaacaaaacgagcttaataatatacaacaatccttctcaaatctccaatctcaatgctccaatttactcctcaacgtttcacaaacccttaatcctctcttcaacgccaacacgaacaacaacaaacctaatatattctctgctctcaattcgtttcgtgatcaagctaagcaagctttagattctagaatctctcgattcaattctggtaaggcacctgtctgggcgagaatttctgacgacggtggtggtgcgagggctcaggtgacggttccgattcgcggaagcgggaaaggattatctgctgatgctattgaggagagattggcgggagttcctgtttacgcgttgagtaattcgaatga

SEQ ID NO: 139 - DNA, 431 bp, Arabidopsis thaliana
tcgagcggccgcccgggcaggtcccacttgtcatcctcctccacaacatatagcttgaaaccaaaaccctctagcgttttcggctaaagctttcgctgactactacaacaatggcgtcctcatccctttcccctgctactcagcttggttctagcagaagtgctttgatggcgatgtcaagtgggttgtttgtgaagccaacgaagatgaatcatcaaatggttagaaaagagaagattggattgagaattgcttgtcaagcgtcgagtattccagcagacagagttccagatatggaaaagaggaagactttgaatcttcttcttcttggggctctttctctacctactggctacatgcttgtcccttacgctaccttctttgttcctcctggaaccggaggtggaggtggtggtacctcggccgcgacc

SEQ ID NO: 140 - DNA, 431 bp, Arabidopsis thaliana
  misc_feature (1)...(431): n = A,T,C or G
ctggtaaaggtggattcatgaagctgaaacagctaaaatctctgatcgatgaacannnaccatcagttctttcagagttttcttcaagaaaagatgctattgcttacttgaaacttaagctggagcgaagtggcaagtttgttgtggagggaaagaagattagtcttgtatcaagcaagaagtgagcgagaatttttggttggaattatcattatacctgcataggaaagtggagattaggacaagttttgttactaaatcatcacaatgccatatgtaaacaaagatcatacttcagtttggaaaattttgatttgattgtaatctatttttacattctattagagtttgcataaaacttcaccctaataagttactctcttatatttggaaccaatataaagcaaacgcatctttattggtggaagacc

SEQ ID NO: 141 - DNA, 431 bp, Arabidopsis thaliana
tttggatacaaatttttaaaagctaaaccggatatgagattaccggttcttacaaagtcaattacacaccacgaaggttcttgcaagacatcatcatttgagatccccatgaaaaaagaaggaaggagaagaaagtacagatgtggttacacaagtagatatatgatatctcttataatggttgtacaaacacaggtcacaagttagacgcaacaaacaatgtcactgcaccaatcccagtcagtcagacccgggttttttgggatacctttagtttaccaagacaggttattttggtttctcaacttcaaagcaatctgaaaacaatattagacaatctcccagtcttctctcgacatgtcgacaaactcggtaacaccatcctcgaacatcaccgagtgctttcttgaatactcatcaaaatgtctaac

SEQ ID NO: 142 - DNA, 431 bp, Arabidopsis thaliana
ctttttttttttttttttgtcgtcaatcagagtttcatctcttattattaaaaaaaggctccaaactaaaaaactcataaaaagagagccgtagacgaaaatctcaagctgataaataatggcttgctcgtctggtcacaagataaccagacgacttgttatacatataacaacacaaaatagcgatgaaatccaacgtgaggattttcaagcttcgtcgagagcgaggactcctggaagtggcttaccctcaagaagctccaaactagcaccgcctccggtagagatgtggctcatcttgtctgccaaaccaaccttctcgacggcagcaacagagtcacctcctccaatgattgtggttactccctttccgcttagttctgcaagctgctttgctacggcctcagttccagcagcaaacttatcgaatt

SEQ ID NO: 143 - DNA, 431 bp, Arabidopsis thaliana
  misc_feature (1)...(431): n = A,T,C or G
gcggccgcttgtacttcaataatcacttatcgacttttatttccacttttgtgatttaatctataacctttaccaccatgaaacatatannaagtaacttttaaaccaagaaccaataatagagaacgcatatccatttgcgtgaaaagtgaaaactaggactcatcaccgatgattttcgagcaagatggtgttttctgtgtgtttcagggcttctcaaggaaatgttgtgcgacgatacggcgctgaatcttaccagaggcagttttggggaggttatcagtgatgaacactctctttggcaccttgaaagctgccaaattcttcttacaaaacgctttaatgtcctcttcggttacagtagttccttctcttggaatcaccgcacagttaatctcttccccatatttctcatcaggaacaccgaatgc

SEQ ID NO: 144 - DNA, 431 bp, Arabidopsis thaliana
gcggccgcattctacaggtgaaatctctcataagttaaagctacataagagtcccaaaaccccctttttttttaatatgtatctgtattaaaagcacaaagcggaagctatcaatagatcagttttttaacaatggaaactaatctctctctgtgctgcctcatttctctgctgaatgtatcaagtttcaaagccaagaaaatatctatctgtgtatgtcttcactcttcaccaaccctactcttgtggcggtgttagaacccactgttcttcagactcgttaccattaactagcacagcaccatccgtagagtcagcgtccaccacaacagcctcttcttccacattctgctgtctcccatcactactctcttcctgacgatcctcctcctcctcttcctctccatcttccccctcttccccaacctcgt

SEQ ID NO: 145 - DNA, 431 bp, Arabidopsis thaliana
  misc_feature (1)...(431): n = A,T,C or G
caccaattagttcttctcgtctctctctctctctttggttaatgtttctacagattctctcctcctaattcagagacgacaaaacgctataaacaacatttttacagtttggaggaggaaggagaaatgataggtttattaactgagagtagcagcagtcatatggtggtaaatgtggatgggttgatgcgtccgataccgatgtctccggttaatgcggaggttgaggagatgagatcagagtcgccggtggttaatgataaggcgttagatatttctgatgatgatcatgatgatgagaatgaaccgcttattgtttctggtgaatgtcgtattnnnnctgatgagtctcctgttgagaatcttgagagcccttgtgcttgcagtggcagcctaaagtatgctcatagaaaatgtgttcagcgttggtg

SEQ ID NO: 146 - DNA, 431 bp, Arabidopsis thaliana
tcttacttcaagccatgtattatacccttagagggtggtgttgcgtctggtttcaaaacagttgaagaagaggtgtttgagacccggttatatacttgcaaaggaaaacgtgcaatccgtttgaagcaggttccttttgcccgctcatcactgaatcatgatgatgtatttatcttggacaccgaggaaaagatctatcagttcaatggtgcaaattcaaacattcaggagagagccaaagctttggaagtcgttcagtatttaaaagacaagtatcacgaaggaacttgtgatgttgcgattgttgatgacggaaaattagatacagaatcagattctggtgcattttgggtcctctttggtggttttgctccaatcggaaggaaagttgccaatgatgatgacattgtcccggagtcaactccacctaa

SEQ ID NO: 147 - DNA, 431 bp, Arabidopsis thaliana
ctaaagcagccgaaatttacgattcccagaattttccctactgacaaaatttcacttcaaatacaaatctcgtcttcatgagtcttcttcttcgtccaaattgaattttctccgcacacgagagttgaattttgattttcggctgtttatatggtctccggtcccttagggttttaattcttctgcagatctctcacgatgagcgttgcgaaatcccaagtatggcagccatgcaagaagaagaggtcctcctcctgattcaatagagatctatctatatatatataagagaccgagatatatatatagagagagagatggcttctcgaacaacgccttcacgatcgactccttcacgatcaacgccttctggtagttcttctggtggtaggacacgagttggtaagtatgagcttggacgaactttgggt

SEQ ID NO: 148 - DNA, 431 bp, Arabidopsis thaliana
atatctagccgttgagcccataactgtacatttctctctctctcctcttctctgtttctctctcttcttcttgcagttttggtttggaagaaagagaacgaagaagacgacatctccagagtttttggcaataatcttttaagaaatgggaaagcttttgtgtgattcaacggcgacatttcaatctccttcaccaacggttccttggagagaaccttctacagtcgccgtgtctctcgaagatgtagatcttgttgaccaatccgcggctgctgcggcggtggacgcggttgagaagacaatggccgccgcaactaccaccgcttgggatgaggtttttggattggaggaggcgcaaagacggcatctgagccggctacacgcgagaggtgtgttgtggaaacatcctggtaaagatgaatcctctgctt

SEQ ID NO: 149 - DNA, 430 bp, Arabidopsis thaliana
ttttttttttttttttttttaatgtgaacttcctatgaaataaatatcagagattcgactcaagagatcgaaattacaaagcagaatacaaatgtaaagaatatataatctcgaatgaatcatgtctcttctttatggtgtgtatcaatccactcactcactatacactaaagaatcttgtgaattatcaatattcaagcagcagcagcaactttctttcccccctgcttgtagtaaccaagataccatctcacaaacttctttagaccagtctgcaaatccgtgcttggtttgtacccaaactctctctgtgccgaactgatattagcatgtgtgaagggcacatcaccattcctcggcagcttcatcatgttcctcttggctttcactttcaacaatctctccaatatactcacaagatccgtcaccg

SEQ ID NO: 150 - DNA, 430 bp, Arabidopsis thaliana
ctttttttttttttttgtgacgcacaatggactagtagtatcgtgataagtacatctaccacacgaaacgaaacgaaaccagaaagacatgttcctaaattaccaaacaaccccttcgtctcttacatacaccatttctcgatgatcaagaagcaaattcatgaatccgtaagccacacaataataatattaataatcattcactaatatataaattaaaagatgaaaaaaaaacgtaaaaaaaaaaattgaggttcagattttgatttgaggagaggaataatctctctgatcttcttttacaacacatcaccaaatcaaatccatgtctctccgaccaatctctcttccgatcggagcttttgaaccaccacaagtttttcaacggttgagatcgaatttttaattttttaaactttgaccattttcg

SEQ ID NO: 151 - DNA, 430 bp, Arabidopsis thaliana
  misc_feature (1)...(430): n = A,T,C or G
acatactgattataagccaaggaacaaacaataaaaatgggcaagaaaaagaaacagaacaaccacccaaacaactgagacactaaagctcacatgtttatttctctgtaaaatgactctatcgtgtgaataagaagacttgatcaaggctttcataaggtctgaatgtcagaatcattcaaacatgaaggcgcaatttttaccggctgaagcataaatcccgctttcctgcattcttcttccagaagcttcacctgagatggaccttcagggcagaaaaccaccactgctcctccacttccagtgaactttgaagctgcaccaaccctccttgctacttccaccatctctatgttcattgctnnnnagcattcatccccaaacatccgcctccgaatgtcgaaattaaggttcatgagttccccaagtt

SEQ ID NO: 152 - DNA, 430 bp, Arabidopsis thaliana
ctgttaaaacttcattctaagtaccgacccaaataacaatctgagtacacaaagtctaaagctttttacaaaaaaagtctcaaaaggataatgagaatccttacagtagttattatcatcaagatgatgcgtcttccttcaacctatacaacgtgatttcttgctgcttgaagtatcggcgatcctcttcatctaccagtacaagattcagataatacttgacgctgaatttgttgttgatgttgcgatgcgttggtgtaagatcatatggggccagaaacagtcttacaggtatcgattcacctctaactggagttccatccatcaactcaaattttgcaagagtttctgtctcgacatgagtattagcacctgcacctgttgattcccgccgtctgatctcaagatccatattcttcatcttgattct

SEQ ID NO: 153 - DNA, 430 bp, Arabidopsis thaliana
  misc_feature (1)...(430): n = A,T,C or G
aattgtttgtttgaagggactgacttcaagcttgcatcttgccatcatcccttgaatgacaaagttgctgaggaatgtgggtttacatcactctccatccgagttgttgaggagttagtgacctttagtccttgccctccccttaaacccccagaaatttcaaatgctgggaagcatctctctgctgcagagtttcattcggtcctgcagagtgccaatgggaagtctgagaataaggaacttgttttgcttgacgcgaggaacctgtacgagacacggattggaaaattcgaatcnnnaaatgtggagacccttgatcctgaaatcaggcaatatagcgatttgccaacctggattgatcagaatgccgagaaaatgaagggcaaaaacgtgctcatgtactgcactggtggaatcagatgtgaaatgg

SEQ ID NO: 154 - DNA, 430 bp, Arabidopsis thaliana
  misc_feature (1)...(430): n = A,T,C or G
actcagacccggaacgcataaacgcatttagacatgaattgacgttgctagaaaaagtccggcatccaaatgttatccagtttgttggagctgtcactcagaatataccgatgatgattgtagtcgagtataatccgaaaggagatttaagtgtatatctccaaaagaaaggacgtctttctccatccaaggcacttagatttgctcttgatattgccagaggcatgaactacttccatgaatnnnaaccngatccaatcattcactgtgatctaaagccaaagtgtcagaaatattttgctggatagaggagggcaattaaagatctcaggatttggtatgataagattgtcgaaaatttcacaagacaaggcgaaagtagcaaaccacaaagcacatatagatctctctaattactacattgcaccag

SEQ ID NO: 155 - DNA, 430 bp, Arabidopsis thaliana
gccattaaatggggtactgattatttcatcaaagcccatcctgagcccaacgtcctttacggcgaggttggagatggcaacaccgaccattactgttggcagagaccggaagaaatgacgacggaccggaaagcttacaggatagatccgagtaatcccgggtcggatcttgccggagaaacagcagccgccatggccgccgcatcaattgttttccgccgatctaaccctgtttactctaggctactactcactcacgcctatcagttgtttgatttcgccgacaaatacagaggaaaatacgacagcagtatcactgttgcccagaaatactaccgatccgtcagcggttacaatgacgagttattgtgggccgctgcgtggctataccaagcttcgaacaatcagttctacttggactacttgggtc

SEQ ID NO: 156 - DNA, 430 bp, Arabidopsis thaliana
cggccgcggaaacagttttagccctgctagaacgagctcacgctggacaagaactagtcgtagttcgtcattgcagtctcctgacagcttaggtgtagacaatttgttggctttagtgccagtacaaacaaatgagactgattctggttcccttgagtcaggaccaggttggcattttcttcgcgggctttacggtaataatcgaaaaagctggaccaaagtttctgctaagaaggctgtacttcagtgggtttcgaggctgcgaggtcggcattcagaaactgtaatctatctggataggaaacggagtgactctggttgtgatgaagattgctcttctagtattgatggtgaagatgtttctatatcacggtttggttctgagcttatgcagtcacctctttctcctttcattggatcaaacaacatt

SEQ ID NO: 157 - DNA, 430 bp, Arabidopsis thaliana
  misc_feature (1)...(430): n = A,T,C or G
agaaagtaatgctctggatattgttcaagcactggaggatttgggatctggattgggtttcgacggtgctcatgatgttgagcattgtcttgctgattctggtgtcgtcaaggatattattcgttatacaggagaagcggaggagattcctttcgtttattctcttccccgtttcccttttaacagaggaaaaagaccagctcctagcttttccgatattggagtagagccaccagatgagcatattcctgtttggcttcctgcgtttcctgaaaccaagatgtctaacgggtcagaggagattaatgttgacaaaatagaaagggatgtgcagagtagagataatggatcatctttgatgagtgtgcagnnntctgtcgatgttgataggttaaaagttcagaaatccatggatcaaaaggatgttcag

SEQ ID NO: 158 - DNA, 430 bp, Arabidopsis thaliana
ccacgcgtccggtgagagacccgggtgagagatccggaagaaggtcaagatcgccggcgacgaatagatcggtgatggattcgaatcagagtagtcgggtgggtggggcaaagactaggaagaataatcagtctccgggtcgggttagactagatccggctaaaaacgggttggatcagcaacagcatcagaattacggttataccacagaggaattgttagagaacccgcttgtttcgttagagtgtttcatatttctttgaaaaagaagaatatttcgatgggaataatgtcttctcatttgacgttggattcataattcgtaaagctacttacttaattacgttacctctgtaattcatttctgtgttgtatttgctgatttaaagttataattcggttgaatgatgtaaaaaaaaaaaaaaaaaaa

SEQ ID NO: 159 - DNA, 430 bp, Arabidopsis thaliana
gatattttttttaaaattttttgagaggaagaaatggagatttcgcagagagtgaaagctagattagccgttctcaccgcgcatttggcggtgtctgataccgtcggattggaacaggtgttgccggcgatcgcgccatggtgtacatcggctcacattaccgctgcacctcatggatcactcaaaggaaacttgacgatcgtcgatgagcgtacggggaagaaatatcaggtccctgtctcagagcatggtaccgttaaagccgttgatctcaagaagataacgacggggaaggatgataaggggctgaagttgtacgatcctggttacttgaacacggctccggttcgatcttcgatttgttacatcgacggagatgaaggaatcttacgttatcggggatacccaattgaagagttggctgagagca

SEQ ID NO: 160 - DNA, 430 bp, Arabidopsis thaliana
ccgcataaactttaaattcagaaggtgcagctcaactctagaatgtgacaaaggtcacaaagcaagagtctgtaaagtgtactcgatttccaaagcctaacatcaagaatttagctaagacaatggttttttcttctaagagtgcgaaaaatggttcataaacattctacaatgtgaaaaagcccaaagagaggaaggattttaaaccttacggttccaatcacctccatttttcgcttagttctttcttctctgaaaggacccatgtgatgtagatggctgcaacaagtgctacaatcgtgatcaggagaagagcgtagctgaaatcgtcggttagtgagtcgtaggtctttgaaggagcaagccttgtgtagaagagatccactccataggcaaagacgtgtgttgttgactctagcttggacggagc

SEQ ID NO: 161 - DNA, 430 bp, Arabidopsis thaliana
  misc_feature (1)...(430): n = A,T,C or G
aaagaagaagagagaaaccatgtcttcgccgagcaagcgtagagaaatggatttgatgaaactgatgatgagtgactacaaggtggagatgatcaatgatggcatgcaagagttctttgtcgaattcagtggacccaaagacagtatatatgagggaggtgtgtggaagataagagttgaacttcctgatgcttatccttataaatctncatctgtnngtttcattaccaaaatataccaccctaatgtcgatgaaatgtcaggttctgtttgtctagatgttattaaccagacctggagcccgatgttcgacctggtgaatgtgttcgagacatttcttccgcaacttcttctgtatccgaatccgtcagatccattgaatggtgaagcagctgcattgatgatgcgtgatcgtcctacctatgaacag

SEQ ID NO: 162 - DNA, 430 bp, Arabidopsis thaliana
ttacttcatccacggtaaggatatcactggaggatcttacatccaatcctactacgccaaagtcgtagcgacccacggatctgcaaagagtctacctgcttcttgcacctcaagtatgaagcctgatttgtgtttcttccctcaatacgttgctaagaccttacaaacaccgcttttcgtcatcaatgccgccttcgattcttggcagatcaagaatgtattggcaccaacctctgttgataaaagcaaagcatggaagacttgtaagcttgatcttaagaagtgtacggccgctcagcttcaaaccgttcaaggatatagagaccaagtgttggctgcgttggcgcctgttcgatccgcgacgacgaacggattgttcttggactcgtgccatgctcattgccaaggtggaagcgctgccacttggtcc

SEQ ID NO: 163 - DNA, 430 bp, Arabidopsis thaliana
ttttttttttttagaaaaacaagagattctatttaattaatcgtcatgtgtgattgtctgctgattcctagtattatggtaaactgaaaacaatttttacttatttagtttcctttgagtgcttcatcatgtatactacctccaccatctcttcattcattcattgatgtcgcaccgtcggagataagggttgtcgtactcaacgtacttggaccagtacggtttgtacttggcgaatgctaaacccagccatggcttgtagttcccattgtaatgcactaccgctgcattctctattgctgtttggtttagcgctgggtcatatcccagccctagtacgtgccagctcctatccattgcatacgtcaggttgtaaaatgttatcagccccggtggcaacgatcccacccacgcgtccgcggacgcgtgg

SEQ ID NO: 164 - DNA, 430 bp, Arabidopsis thaliana
  misc_feature (1)...(430): n = A,T,C or G
gatgggtctgaaagtgaagaagaaactgaagagatgatatttgggagttctgaagctgcaaaacagttcttagcagagttggaaaaggcttcttctggtatagaggcacattctgatgaagcaaacatttctaacaatatgtcagataggattgatggccagattgtcaccgattctgacgaggatgtagacacagaggatgaaggtgaggagaaaatgtttgatactgcagctttggctgcgcttttgaaggcagccactggtggtggaagttcagaaggtggcaattttaccataacatctcaggatggcacgaagcttttctctatggatcgacctgctggtttgagttcatcgttaaggnnnttgaagcctgcagcagctccacgtgcaaaccgttccaacatcttttccaattctaatgtcacaa

SEQ ID NO: 165 - DNA, 430 bp, Arabidopsis thaliana
tttttttctttgggcaattgataatattgcaaaatctcaaaagaggctgtttttttttatcaagtaaaaatacacacattgtgtctattatggttttactctttgatcaaatcctgcatgtgttgtgcataacttcttcccggtggaatgaatattacatcttcccaacctgaattcttctcgctcatctccattttcctcaacacatcttccagactcccaaccataatttgttgatctcctcttgatgctctcgtatatttagaaagttccctctctatatcttccttactgaaatatacagggcagtaacgtctattttttttcctcacaacaagaagctcagactgaaaaaccggaactccatcaaacccattcttatttcctgaggatttgagctctaacgcattctttatttggattggatctg

SEQ ID NO: 166 - DNA, 430 bp, Arabidopsis thaliana
  misc_feature (1)...(430): n = A,T,C or G
cttgtcttgtaatagatctccaattgagattattatatgtaatatagaatgtgaaagaccacctaacatctccaactctttttaatgaaatgtaaaacaacaaacctctgtggtttctgcactaaatatcatagagaaaaaggtaggcatgggatcgagaatgatgtcagaaatatatttattctgtcttctctcataacttgttgatcttactcaaaaagtctgaagccgaagcagattccattcctgtagcagatgcactgtccttaggtgtcactgtcttagctgctttgcctttctgcagtgcctgtctttgttgatcccattgtgcctanaaatcagaatgatacaaacaaaccaaacttgaatgggtattgggcgttcgacaaagagggcattcttgcttctcgttgcaccattccataatgca

SEQ ID NO: 167 - DNA, 430 bp, Arabidopsis thaliana
aatctgacattttttctcgggaaatttttttatccaaatcggagtaaagtatcgaatctagagaatccgctatggatgagacctattttgatctattgaatttctttaagaatccctcttttacagagacatttgtcgacatcttactatgcgcagttccgatttggctcgccgttatgatcgggttattaatcggatggtcttggcgtccaagatggaccggtttgatctatttagggtttcgttctaagcttcggtttttatggaccgcaccgcctgggtttggtgctcgtcggctttggcttgctttcaccgctctctctgctttctccgtttgccgaaccatctggtcaaggaatgacaccagagctaataaatcggcgaccggttcagcttcgtcgcagacgcctgttgaggataatgatgaatc

SEQ ID NO: 168 - DNA, 430 bp, Arabidopsis thaliana
agatctcttcttattcaaattcaattgagagatactctcttcttcttctttttctctatccagttccttctgtgcgaagttcttctgattaatttgagtttcttggaagcttttactcgatcttcatcggatcttagggttttgtttaaatccagatcttgggttttgttaaataatggcgactccttatcctggagcgacgcaggtgggttcgtactttgtggggcagtattatcaagtgttgcagcagcagccagatcttattcatcagttttattctgagcctagtagagctattcgtatcgatggtgattccaccgagactgctaattctttgctgcatattcataacatggttatgtcactgaatttcactgcgattgaagtgaagacgattaattcagtcgagtcgtgggaaggtggtgttctt

SEQ ID NO: 169 - DNA, 429 bp, Arabidopsis thaliana
aaccaatgtataattttgtgcagtaattactaaaacaaagaacagtgccatacggtaaagccaaaaaagaccgtagaattcaacatcacaacacgaaaccacaacacaataaatggattccatcatctgattgatttaccattccctgtttttatgtacacatccttcctgcttttgattatctttcttcaatcgctttcaaagtcgtcttcatctccaaatgagaacacagatgcatcagccgccataaccttgaactcactctctgagcttgaagaagcattgaccccagccccagagggtttttctgttgcttcacccttgctcacagttactccttgcaccggctgtgatgatcctttgtttccagaaatagacactttctctgtcgctttagtcagaacagcggtttcatctgcgctctttttg

SEQ ID NO: 170 - DNA, 429 bp, Arabidopsis thaliana
ctttcagatttcggttacagtgcctgtgaattcatagtttgcaaactgaagaacaacgagatcatgagacagagtttcaaaatccattggagtagttcgtttccacgtggagttgaagcagaggaggtcaatgcagttgcattcgtcgccttggttttgttccctcctgcagtaatgtatatgcatttgtcataactagggtccttgttgactttaacaccagctcctccaaagctgcaagcaacgtctgttgctctgttctgttggaaatagctattgaacacgaaagaagcatgagaaaccaaagtatctggttgaaaacaaggctggcttggctgaatagctgtgcaatcaacatttccaggaccacaagcccaatccaaagcacctttcagatctctctctgaagctttagaagaagcaatgcac

SEQ ID NO: 171 - DNA, 429 bp, Arabidopsis thaliana
ctctttctctggattcacaactccgcgatgctctatgcttcggtatgtcccattagttatgatctctaagacgtctccaatattgacaatgaaagcatttgggaggggtttaacaggaacccatttcccatctttcttgatttggagaccttcaacgtcattcacttgcatcagtacagtgagtccgaccgaatcagaatgcggggttagaccaataacctgatctggttgtgggcatggtgggtagtaattcatcctcatactttgaaccgaatcaacatcatcaaacaacttttccagttcctctggtttgatctctagggctcttgccattttcgctattaagatcttagctacgctctgcacttcagaagaatacatctccagtgtatctctaaagggaagaggtagcttggggaacaagtgagg

SEQ ID NO: 172 - DNA, 429 bp, Arabidopsis thaliana
attagctcaaacaaagagcaataatgtttttacataatatagtggctttcttcatgctttctagcttgtaaaggttacattagatatgtccttaaacttttctttaatcgctgcctgtattcccattccaatcgactccggtccaacatattttacaacgcagtcctcgccttcaaccgataaaacttcaacacttccgccatagttcttgatagctggcctcagtatatctagatgagcattcactgcctccacggttatctgttttacttcttcatcaaaaacttgtcgaatatctttcaatgcatctccaaacttttccttgagtaccctctctattcccattgtcatagttgttgaagaacttggacagctggtacatgctccttggagcttaagagagactaccccatcttcaacggagacaac

SEQ ID NO: 173 - DNA, 429 bp, Arabidopsis thaliana
  misc_feature (1)...(429): n = A,T,C or G
ccacgcgtccgctcagtatgaggttgatgcagacgactacatagtagcagtgcaagtgacctacgacaacgtgtttggccaagactctgacatcatcacatctattaccttcaatacattcaagggaaaaacatctcccccctatggattggaaacgcaaaagaagtttgtactgaaagacaaaaacggtggcaaacttgttgggttccatggacgcgctggcgaagctctatatgctcttggagcatattttgctacaaccacaactcctgtgactcctgccaaaaaactatctgcaattggtggcgatgaaggaactgcatgggacgatggtgcgtacgatggtgtcaagnnngtgtacgtaggacaaggccaagatgggatatcagccgttaagtttgagtacaacaaaggcgcggagaatatcgt

SEQ ID NO: 174 - DNA, 429 bp, Arabidopsis thaliana
  misc_feature (1)...(429): n = A,T,C or G
taaaaaaacaaaaaacaaacaaaaatggcttcccacattgttggatatccacgtatgggacctaagagagagctcaagtttgcattggagtctttctgggatggcaagagcagtgccgatgatttgcagaaggtgtctgctgatctcaggtctgatatctggaaacagatgtctgctgctgggattaagtatatcccaagcaacaccttttctcattatgaccaggtgcttgacaccaccgccatgcttggtgctgttccatctagatatggatttaccagtggtgagatcggtctcgatgtttacttctccatggctagaggaaatgcctcnnttccagctatggagatgaccaagtggtttgacaccaactaccattacatcgtcccagagttgggccctgaagtgaaattttcttacgcatctcac

SEQ ID NO: 175 - DNA, 429 bp, Arabidopsis thaliana
gcggccgcttagcctccaagagagagagagagagagagatctgcatatagagaatgatagaaccgtcgatggagagagagaatggtgctttaacggcggcgacaacaacgacgacggcggtgacttctcctcctccgatggcttcttcaccgcgtcaagctttagttgagagattgaaagattatggacaagaagatattttctctctttgggatgaactttcaccagacgagaaagattttctcgttagagatattgagaatttggatcttccaagaatagatcggatcattagatgttcacttcactctcaaggtttaccggttgcggcgattgaaccggtaccggagaattgggtttcgacagtagatggtagaacaatggaagatagagagaaatggtggaaaatgggattaaaaactatctatg

SEQ ID NO: 176 - DNA, 429 bp, Arabidopsis thaliana
tcgagcggccgcccgggcaggtcggagccacgatctgcatccagtcaacctactggcgggtcggtgagtttgaccacgagaggaagcagtacttcgtggttgctggtccaaagccagaagggttcggacaagattcgttgaagagtttcttcaagatcgagaaatctggagaggatgcttacaagtttgtgttctgtcctcggacttgcgactctggcaatccaaaatgcagcgatgtcggtatattcatagatgaacttggcgttcgtcgtttggctttaagcgataagccgttcttggttatgttcaaaaaagctaatgtgaccgaagtttcgtccaagactatgtgagaggacaactctcgatcttttactttgactaataataaaacctatgttttttttgataaaaaaaaaacctgcccgggcg

SEQ ID NO: 177 - DNA, 429 bp, Arabidopsis thaliana
  misc_feature (1)...(429): n = A,T,C or G
tcgagcggccgcccgggcaggtaagaaatctccgggcggtcgaagaagatgaaatcgttcaaggaacaatacacgttggatgaaaggctcgcggagtcgcgggagataatcgctaagtaccctactcggattccagtaattgctgagaagtattgcaaaacggatctgcctgccatcgagaaaaagaagtttctggttccaagagatatgtcagttggccaattcatctacatattgagtgctaggttacatttgtctcctggtaaagccttattcgtgtttgtcaacaacactctccctcaaactgctgctctgatggactcggtctacgaatcttacaaagatgatgatggattcgtttacatgtgntatagcagtgagaaaacctttggttgatccaataatgatgttagtgtctgtgtacctcgg

SEQ ID NO: 178 - DNA, 429 bp, Arabidopsis thaliana
attagaccaacatttgttttctatcaatttgtttgcatatctgtactatcacacacattttttcaatctataacacacacacacacacaatgatcaaatgtacacatgactcagagcgtatgtaaatgtacacatgcaaagaaaaagaggcaaagcaactcatatctttttgatctgggaatccagcaaagcacgaccagtatggcagatccggtccctttacctaaacttatcccaccatgattaaccattcaatataagatgcaaacctggacctgatccaggtaaccgagcactgatatgagtgttcagctgctaagccgataataactctaacggctttgactggattgggcaaaggcaaatctactcgtacttgtatctgttctcggactctctcgtttatgtacctcagaagacatagtctcg

SEQ ID NO: 179 - DNA, 429 bp, Arabidopsis thaliana
ccacgcgtccgatctttaaaagggactctttttggtggttggaagcctaaatctgatcttccttcactcattgacaagtacatgaacaaggagattatgatcgatgaatttattacgcataacctgtcatttgatgaaatcaacaaagcttttgttcttatgagagaaggaaaatgtttgcgttgtgttcttcacatgccaaagtaatgtctcggaaaacacatgtcacagattcaagaaagattaacgagagctctgtatattctacagctgagttgttgtataaaacaaaagtgatggttttctatagagttatgagacttttttttttcttttggtttgttgtgaagtgatcgttcatacattataaagatggattctcacatgatgaatcaaacgagttcctagaaaaaaaaaaaaaaaaaaaaa

SEQ ID NO: 180 - DNA, 429 bp, Arabidopsis thaliana
ccacgcgtccgaaagaaccgaacacacgctatataccactggaaccgcaatgatgatgggaagaaagtggcaacggatgaatttgtattacacaaccagtactggggaaagaacattcgacggagaaagcttaagaagcattatatcaggagtgttgttggtggctggatcgccacttaattcactaagtctgcctcatgctttgtatcaaagtgtgtgaggatattcttttaactcggaacttattacttaatttgatgttaaatctctttcccgcttaagttttcagcaatctggaatatgaagggaattatgtattcttatcagtcttttgatgaagtgaggtctacttctgggattatggatttggtgaataatgtattccttagaacggtgttaaggaattgtttcacatgggtgtgaattgag

SEQ ID NO: 181 - DNA, 429 bp, Arabidopsis thaliana
tttttaaatcaatccttttaggttttcattgatagtttgcttaaagcttacaacttgagtttgagaatacttaaatacaaaggtggagacttagctaaaaccctagagacattggacagatgtcatacatcaagttgagtcttctgaatcaagggttgagaaacgattctcgagctttacgttgaactgctttgccgtacaagaggtcgttgtctccttattgccagctccacttttgtcattacttgaggaagattctagactctgtttacttgaaacagatgaccgttgcctccacttctgcttcttgggcttggtttgtgcgaggcccatctgtttcattttcctctttgctccattagccgaaacgacaacgtattgtcgtttgccagagaaagcctctgctcttacctgtattgtgttgatact

SEQ ID NO: 182 - DNA, 429 bp, Arabidopsis thaliana
  misc_feature (1)...(429): n = A,T,C or G
ggtttttgttgccactgctaatagggttcaacctattccacctcctcttctagacaggatggagctaattgagttgcctggttatacgcaagaggaaaaacttaagatagctatgcgccatctgattcctcgagttctagatcagcatgggcttagttccgagttcctcaagattccagaggctatggtaaagaatataattcagaggtatacaagggaagccggtgttcgtagtctagagaggaacttnnctgctttagctcgtgcagctgctgtgatggtggcagagcatgaacaaagtcttccgttgagcaaagatgtgcagaaacttacatctcctctgcttaatggtagaatggccgaaggaggcgaagtggaaatggaagttattccaatgggtgtaaatgatcatgagattggaggcacctt

SEQ ID NO: 183 - DNA, 429 bp, Arabidopsis thaliana
tgtttatgagttcgctgcatttttcaacgggcatgtgtttgttaatgaaaagggtgctcagtttaaggctatagttgaatatgcaccttctcagcgtgttccgaaaccgagtgataagaaagatcctcgtgaagggtctattagtaaagatcctgattatcttgagtttcttaaggtgattgcacaacctgttgagaatcttcctagtgctgaaatccagttggaaagaagagaagctgagcagtctggtgcttcaaaagcggctcccattgttacacctcttatggaattcatacgtcaaaaacgtgccactgtgatgggaccccagggtttatctgatattcgaagaggaggtagaagaaccagagtagtctctgcaaacaagccgagtccaaggccctcgaaacgtaactctgaaaagaaaaagta

SEQ ID NO: 184 - DNA, 429 bp, Arabidopsis thaliana
actccatcacacttttgcaacaatgtgtaaaagaaaaaaaaaatctcttgaattggtaagtgtttcatgttcttcgacaattcatgagacttgcgagtagatgaaaaccagtagtttgatcggggtcttgttcataccatataagtcattccaacttgcatcaaatgtgtatgcggaacgcttaggtttgttatccctctcctggagttcttcctcaagaaagcatacaagtaatttattaccagcttcttcagaaaccaagaatccttagtagcccttatgtccccatgtcccagtagatacaccacccctgactctttcgctttgtgtataaacgacaattctttttctagactctgctccacatccaacgccgatgaaggacctgccccaaaatctatgctggcctttcttctctccatgggtcgc

SEQ ID NO: 185 - DNA, 429 bp, Arabidopsis thaliana
cttctattaccagaaaggaaagaaagccgaaatttgtttcaagataaagtaatttaagttggagcttgtttcttggtcgtacagtgtcaggtgaatagagaagaagaagatggaaaacacagacgagcttgtctccattgagctaccagctccagcttcatggaagaaactgttttatccgaaaagagccggtactccgagaaagacggagattgtgtttgtggctccaacgggtgaagagattagctcgcggaagcagttggagcagtacctgaaggcccatcctggcaatcctgtcatctctgagtttgagtggacaactggggaaactccaaggaggtcttcaaggatcagccaaaaggttaaggctacaacgcctactcctgacaaagagcccctcctgaagaagagacgatcttctctcacgaa

SEQ ID NO: 186 - DNA, 429 bp, Arabidopsis thaliana
  misc_feature (1)...(429): n = A,T,C or G
caattgggccctgcagggagcgctggcgctttgtttggttgaaaggataagaatgtgaatnnnnnnattgggacccgaagcaaacattgaactaacttcgcctcctaacactcacctcttcaacactcatagaatccaaggtgatcaacgacaaagctttctcaagaacacaagggtttatcgtgggattcacggatatacgactccaaatttaaacctttgacatcttgagagtgtgtagtcccacgaatgaccgaaagggcatccagagggccttctttttgttgagccgcccggcccaccacccagccgtggtactaataccacattgttgcatggccacttttatgccattcttgtctttcatgacacacctcgccccaacactagaggcgatcgttctttccaccaaaagaggagatcccaggt

SEQ ID NO: 187 - DNA, 428 bp, Arabidopsis thaliana
gcggccgcgttcctctctcttctctctcttcttaacctatttttcggatctagggtttttccatggccgcctctgtaaggagcttcatcgacgaaggttgggttagcggctgacacgggagtgggcgcctttcttctccggtggtgtgtggtgtggtggatctatggtttcaatgcgaattggtggctctcctcacagcagccatgagatgatgttcctccttgtctgctggtcatggacgctagcggattggaatggattctttaggctcgacagcttgtgagctgtagctccggtgagcggcagaagtcggactgtagatcggtgggtttcacctctttgcgacgagattaacagtggatctttggtcggatcctagatggcgagctgcgggtgttccttagctggatcttggtggatgatggctt

SEQ ID NO: 188 - DNA, 428 bp, Arabidopsis thaliana
  misc_feature (1)...(428): n = A,T,C or G
taatcctattattattcgataaaagacgacaataacttatgattaattaaaaaaaaggtacaaaaattcacacttaaggattttgttttcatcttgttaccgtagctagctagtaccataaaaagttttactgattacccgtaaaactattaatttttctactttgacatgtttagcatttattccctgacaatccgataacatttttggatagatcgtaagtgatacgtgtcccttgctgctgcacattcccgatgatcgacaacgacgacgacgtcggagcaaaagcgaannaaacgttccactatcatccacagggatcagataattcttcgccggcaaatcaagcgacttccctcccgtgaaatgaaacgcaaccgtcggtactttcacagtggagagagacgagaaatcgtaacacgtgtcga

SEQ ID NO: 189 - DNA, 428 bp, Arabidopsis thaliana
  misc_feature (1)...(428): n = A,T,C or G
gaatatttattttgtcactcaagtttgatattcgaagatagacgctaaaattgaggataacacacattatagacaaanaagtaaagcaaatcacatgtcaacgtccaaagcattggaaccagagacagtatgtgtggttgtcgacccgacacataatccccaacctcttactgaccggaaagaaaaataactacctgatccaccgacaattttaactcctggcaacattcaagcagcggacggtgcggtcacgtagttgagccggccagcttcagtaagagcggtgatgaacggcttcagattcacgagatcgacctctgtgtccacaacggtaacaggtttcttgtaatccaaggattcgtcgtcgtaaatgtnccaccattttttcactaacatttttatatcttccctctccatgttcgcttctt

SEQ ID NO: 190 - DNA, 428 bp, Arabidopsis thaliana
ttttttttcgaagttgcaacgaaaataattcacagtttttgttcttgttcatacaacaaattacaaaattgcaatagaaaagagctcaaaaaccaaacaagaaattatttcaagaaacaaaagatccttctcatgagggatgatgattataatttagtaagctctggagttagatttgctgcaaaccttcctgatctctccgacgcgatcttcaccagtgagaacaccaacgttgaccagcttagccatcgacacagcaaactgctgtctgaatatctgaggtgattgctctgcgaaagtctttacaagcggacagtccttgggtccttaacaagctcctgatcagtcgacaaaactcccatatgcttctgaagattaatgtagtactgattatcgaacactgctggagttacagcgtcgagatcgac

SEQ ID NO: 191 - DNA, 428 bp, Arabidopsis thaliana
  misc_feature (1)...(428): n = A,T,C or G
caaaattaacagaaagcaagtatcaacaaaagtttatctaaaatctattacagaaacaaagaaactgtgtagcatcagaagccagcaaaaacgcagtcccacgaacagagaatttagaatctgaggctctctttccttcaactgccatagagaccagagatatggaaaccaacaagtacatctatagttctaatgatgtcttacatgacaaagaaattctgaagtagcggcttgagaggtcatatgaaattaagtaacctaagaacgacacatgtttatgggatccattttgcatgnnntattcgcaatcaagcacagaacaccagtagaccagctaaatttcgtaaccaagactaagaaaaactagcaaaataggcacaactcaaaagtaatcaacacttctaatttctaactagttcaaaacagta

SEQ ID NO: 192 - DNA, 428 bp, Arabidopsis thaliana
aaatcgtaatacatatatacacaaaagtgaataattcagatggtttggtacaaagttgtttttttaaggatgttgggttacatcaaagcatggaatcacttaaatagttttggaaacacaagacatgaatgaaaagagaagaaagctgttgctgaatcgtgattgagagaaagtagagagagctacaacgcttacaacaaactactactagtcagcagtccagctttgctcaacaacatcacgcactctcctgttgtactcgcgcttgctttcgctgtacatccgagcagcttccgagtttgcaggagaattcggattagggtcacagagcaaggactggatggaggtaagtatagcagcaacatcatagattggactccactggttttgtagaatgtccaagcagatactcccatctgcataaatat

SEQ ID NO: 193 - DNA, 428 bp, Arabidopsis thaliana
ttttttttttaagaatccaaactaggaccaaactcattataatatttttgtgaagacattacagttttttttaactaaaaccaaaagaaatcgaataccaacaccttatagatacaattttcatcaacccacttttgggttttttctttgtatgtcgttttctattggtttatttattgttcagattaaaaccacactcgaaacaagtactttgcgtcatgaaagtttatcacgacagattctaatcggttaattaattaaccgcagagcaaaccctacggatttccccattagctccggtaaccacaccgatattactcattctgaccattgacctcgcaaactcaacgttgaaggtgcttctaggagccatcaattgttgcactatgggtctagtggctggatcggtccaaaggacttgatcggat

SEQ ID NO: 194 - DNA, 428 bp, Arabidopsis thaliana
  misc_feature (1)...(428): n = A,T,C or G
ttttttttttttttttttaaagtgacaaatacaaagtgtaccatatcctaaaccagaaaccacactacacataattcatagcagagtttaagatacagaatcagagaatgattcagacaaataaggacaacatcaacaacaaaaagaaannaaaaacagaaaaataagcctttttgcaccagaactcaaaaagtcgaacttgaacctggcaattgtcaataacagttgcaaaagctgaatctcatgtttcccaaaccaaaggatttcaatttgtactactgtatacctttttcaggcaaatttgaatccaccaacgggagcagcgggattgttcccaaaattgaaagcctgttgtgaattgtcattcccgccgtcctgcagaatctgttcttcctcttcttcagcccaatatctctccaatatcttaa

SEQ ID NO: 195 - DNA, 428 bp, Arabidopsis thaliana
gtcaatttggtcgagaagaaattgagcgttgaagatgacggaggcgatgataagaaataagccaggaatggcgagtgtgaaggatatgccgctgcttcaggatggtccgccaccgggtgggttcgcaccggtccgatatgcccgccggatatccaatacgggtcctagtgcaatggccatgttccttgccgtttctggtgcctttgcttggggaatgtaccaggtcggccagggaaacaaaatccgcagggcattgaaggaagagaaatatgctgctcgtagaacaatacttcccattcttcaagcagaagaagatgaaaggtttgtgtctgagtggaaaaagtatctggaatatgaggctgatgtaatgaaagatgttccgggatggaaagttggcgagaatgtgtacaattctggtcgctggatgc

SEQ ID NO: 196 - DNA, 428 bp, Arabidopsis thaliana
tcgagcggccgcccgggcaggttttttttatggtgtaagaactttcaaaataacaatgaaactttaaaatagccataacataaacaaaacaaaacaaaaagacgaacagaaaacagaaagtactacagtgataggtttgataatgtaattagttaattaattgctctaatacagaaacttagggcttgtgattctgagtataaatgtaatcggtgtgaagaacaaggcttcgtcttatcaaacattcttcttctccaattccgttgcagctttcttcttcaaccttgtctccttcaatttccttgacggagttttctctggacaaagcggtggttgtcgtcggagtcagccttgctgcgtaggttagcgtagagcaaagaaggagagccatgatgaaaatggttgtgaacttaacctcggccgcgacc

SEQ ID NO: 197 - DNA, 428 bp, Arabidopsis thaliana
  misc_feature (1)...(428): n = A,T,C or G
caaagtgtgtatactaaacaagcaagcatgtgagcaacatttaaagtttacaaagtctgtctaatacgaaacagattaaccagaaaatcaaagttgtgttgttagtttatcgtcaaagcccaanaagcaaagagtagtaaactgattattttacatatgattcaacaccaannngaagaagaagaaacaatacatctcaaagtcgaaacaacttatagaacaagaccggtttgtatcgagcaaaggcttgtccgatcgccagtccaaacaacactccgggtccatagcctatcgcagctgctttccagttcaatgcgtgttcttgcttaggtagttcttgctcttctgtctgtggtgttgatggtactccatttccccttaaacaactctcttgaagaggaagaccacaaagattgatattcccttca

SEQ ID NO: 198 - DNA, 428 bp, Arabidopsis thaliana
gcggccgctctctatattgcaagaaccaaagtttatacattattacatatatgtaacgatactgggaccaataccattacactcgagtctatgaagcaacaaacatgcaacaagctcgcttatagcttcacaacacttacacttgacgatagaattgttagtctcttgcacacaaattaaatgaatcaaatagatccatcgctataggatctatgcaatttactcagagtttgtggggaagctaatcttatatgtcaaaagagatgaacatcttcttatttttctcttttacttctgttgttgttccgccattgccttaagcttttcctccaaaatgtctttctcaagaccgtacattctgttcaaagcatgcatattctcaagggtctcgctcagcgttctactgtcacttccgtcacatctcaaat

SEQ ID NO: 199 - DNA, 428 bp, Arabidopsis thaliana
attacaacacaccaaccaaaactgcagctaccactaccgaataccaaacctttacccaacaagtcacaagtctcctatttctctccttgtttcctcagttatgaagtagttattctacatttaataaatctgtacttgtcgcaatacctacaaatgtacatttgatgcgtgtctcaagatcgagatggaatgccggtgagccatgcctgaaaagtgctttctccagtgcaaattatctatcctctgagcagttaacttcgtggttcaaaatcaggacaataactaaaacattttatcccgagacttcatagattcaccaataatgtgatggccagctatcagatcagacgcttctctaatgttgcgtggatcgtgggcaaaacaagtcttaacattgagacgtaagccgtctggttccttaaacaaca

SEQ ID NO: 200 - DNA, 428 bp, Arabidopsis thaliana
agattacttagctactgtggatgtggaaccgagttcatccacatactcgagtgttatccacagattaccaatgccttaccttgaagatgaacttcatcactcaggctggaactcatgtagctcttgctatggtgattcttcttgcgagagacgttatctcatcttgccttctcttctgtctggtcgtatttacgtgatcgatacgaaaacaaacccgagggaaccatctttgcacaaattcgtggaccctgcagaggttttggagaagacggggttggcttatccgcatcagcctcattgcttagcttccggagacgttcttgtgtcttgtcttggagacgaagatggaaacgcagaaggcagtgggtttctcttacttgattccgagtttaacatcaaaggaaggtgggagaaggatggaaacagtc

SEQ ID NO: 201 - DNA, 428 bp, Arabidopsis thaliana
gcggccgcataaacttcaaattctcttccaaatcttgaaacgaatttctcccaaaaatctctgtttcttcacaaaaaaacaaaaaaacaatgttgtgtgcatcatcttcgcttgctcttttgggtcctccttcttcagctatggtgactatggcttcttcaccagtgtccagatttgttggatttggtcatcatactattctcaggtatgataatgatcaacgtcttcgtcgtggttgttcttggactggaattgaaaagaagatcccttttcctcggaagaagactgcctctgcttctgcttaccctctctttcgcagtcagcatactaaagactcatcaagacccaaaaattacaaagaggttactaagtcagccaggcaaatgtttgctcgagagatctctatccaatcgaaagacagtgaaatt

SEQ ID NO: 202 - DNA, 428 bp, Arabidopsis thaliana
  misc_feature (1)...(428): n = A,T,C or G
gcggccgccaaaatatgattatcccaaaaagaggttataaattattcgaggagattattgacaacagtgctctctatagatcatttttccaatggaaagatgaataactctcaccgggaataaaagatgttgatttctctgaacccaaaagctattaaaaaaactccatgaagtttccttctctaactctgtagagcggcttgagcaatctcgagagcttcttcgactgaagatgcgcttgcgngtttagccttatcgacaagtggttggcttcttgctagctttggtagaagctggaactcctcaggcgatccgctttctactagaacacctttcaacctgccagattcaatccagaaggtagcgattttcgggtcaaagttcccaacctccactgtttctcccacattatctccgaaaaactgcca

SEQ ID NO: 203 - DNA, 428 bp, Arabidopsis thaliana
ccagacaacttaccgactgatacaagcagttcttttgtccataacctgaagaaatctgtgagggaagcggctttattgattccttcttcagcaggctcatcacgggatagtcaatccgatgagggctccgagcattattttgtacctctttcagcaactggcttttcccgttttccatcagaaaccaaagccctgcctctcagagggtcgagagcacttacctctctgagcgagccttcgtttcttgaacccaatgttcccgatagctttgcaccaagcaagtacagcgatatacctgacacgtatgatgatcttgattcattcaaagattacgataatgggaacgggtttctgtcggttgctggatcaaacagtgtagcttctgatgcacaacaatcattttacgatattgatgatcaagtattttc

SEQ ID NO: 204 - DNA, 428 bp, Arabidopsis thaliana
aaccatgaagactttcttaagtgtctttcttaccgaatgaacgacaacaccgtcgaacccaaagtcatacacacttccaaagactcttcctttttttccatattggattcttcgatacaaaatccaagattctcggtttccgaaacacctaaaccggtctcaatcatcactcccgttaaagccagtgacgttcaaactgtgatcagatgcgcacagctgcatggaattcatgtaaggactcggagcgccggtcactgctacgaaggtctctcttacattgcgtacaacaaaccattcgctgtcatcgatttaaggaatcttcggtctatatcattagacgttgataaccggacaggttgggtccaaaccggagcaacggctggggaattgtattatgagattgggaaaaccaccaaatctcttgcttt

SEQ ID NO: 205 - DNA, 428 bp, Arabidopsis thaliana
cccggttcgagcgggtttcacggcggaatcagacgattcccgttagcagctcagccggagattatgagagctgctgagaaagacgatcaatacgcttctttcatccacgaagcttgccgcgatgccttccgacaccttttcggtacaagaatcgctcttgcttaccagaaggaggtaatatacactaaattatatttgtctgagtttccatgagatttttgattatttgtttttattgtttttggatagatgaagctacttggacagatgctttactatgttcttacgacaggttcagggcaacaaactttaggagaggaatattgtgacattatacaggttgcagggccttatggactctctcctacaccagctagacgtgctttgttcatattgtaccagaccgcagttccatatatcgcagagag

SEQ ID NO: 206 - DNA, 428 bp, Arabidopsis thaliana
gtcgcttcttctgcattttctgcttcccaatggcttccagaattgctgattctctcttcgccttcacgggcccacagcaatgtcttcctagggttcctaagcttgctgcttcttctgctcgtgtttctcctggtgtatatgctgtgaagccgattgatcttctgttaaaaggacgaactcatcgaagtagaagatgtgtagctcctgtgaaaaggagaattggatgtatcaaagcggtggctgctccagttgcaccgccttcagctgacagtgcagaagacagggaacagttagcagaaagctatggattcagacaaattggagaagatcttcctgagaatgtcaccttaaaagatatcatggatacacttcccaaagaggtgtttgagattgatgatctgaaagctttgaagtctgtgttgatatct

SEQ ID NO: 207 - DNA, 427 bp, Arabidopsis thaliana
ttttttttttttttttttttttaagatttgaacgcaaacaataacaaatactctataacaaagatgaatacagacatcaatccatcatcatataacaactaaacagaagcagacaagcttgggacaaaagagaaccaccgaaacccacaactccatttctccggcaacgaaggacatttaggaacccaatgccatgtccttcttccaacatgaaaaaacagaatctcaggccaattgtaacaacacacacaaatcatctccttatgccacagacagtacacatgctcgtagttatggtaacaaaccgaagtaaacttcctacaaacaatgtccggtaatgtttctacttcgatccaactctctgtttcttctttaaattcccaaatcttgatactcctacaaatcccattgctccccggacgcgtgg

SEQ ID NO: 208 - DNA, 427 bp, Arabidopsis thaliana
cggccgcccgggcaggtacaaaatcaacagacttatctgatacttgcatttgtgagaaactataacatgtggaatatcaatatgctatagtttcatagtgtgataacttggtctccttcaagctctgatataacaatcaatgagtctcccatttcgagggaaagaggttctgtctttggaaccggattgattatctttttaccgccttttatgtagcctatggcaacttctctccttagccaagctcgctctgaaagctccgtgaatgaagggttctcgccctctttcatatacagttcaatgtcctttacgtatatctcatcaccctctgcgtccaaaatgtccttccatacctcgtttaattcgctgttttcagcaacttgtgctgttacaagactcataacttcctctgctgctatgaatgtca

SEQ ID NO: 209 - DNA, 427 bp, Arabidopsis thaliana
tttgatttcgtcatttcatacggcgcgaagcaaactctgttctcctctccggaccatcagctgcgtcgccggagacgatgaaaccagagaagcatcttctcttccttcttcgatatcttcgcttttcgtgaaagggttttcggattcagtgagtgaaggacgtttaaagaaagtcttctccgagtttggacaagttaccaatgtaaaaatcatcgcaaacgaaaggactcggcagtcactaggatacggatatgtctggttcaacagcaaagaggacgcacagtcggctgtcgaagccatgaacggaaagttctttgatggcaggttcattcttgttaaatttggtcagcctggtttgtcccgtcgccggagaccacattccgatttcctttttgtaaataaatgatcttaaccatttactgtatgt

SEQ ID NO: 210 - DNA, 427 bp, Arabidopsis thaliana
ttctcttctctgaggctcgttggaaatctgaattctccgatcgaatcgaaccaatcgcagaggctaagaagaggacctttgagagaatctccgagtcaggatcagaaaaaacggtgatacggaagctagttctagggctaatgggcgccgcgggctccaaactcgagaaagctctcggcgaccagttccccgaaggtgaacgctactttggattcgagaatttcggcaacacttgctactgtaacagcgttttgcaggctctttatttctgtgttcctttccgtgaacaactgctcgaatactataccagtaataaaagcgtggccgatgctgaagagaatcttatgacctgcctggcagacttgttttcgcagataagttcccagaagaagaaaacaggtgttattgcgcctaagcgatttgtaca

SEQ ID NO: 211 - DNA, 427 bp, Arabidopsis thaliana
caccaaacacaaagagaagaagaatctgaagagttttgttattcttcaccaagtaaacgggttggatctttctctaattcaagctcttcagctgttgttatcgaagatggatccgatgacgatgaacttaaccgggtcagacccaataacccacttgtcacccatcagttcttccctgagatggattctaacggcggtggtgttgcttctggctttcctcgggctcactggtttggtgttaagttttgtcagtcggatctagccaccggatcgtccgcgggtaaagctaccaacgttgccgctgccgtagtggagccggcacagccgttgaaaaagagtcggcgtggaccaagatcaagaagttctcagtatagaggtgttacgttttaccggcgtaccggaagatgggaatctcatatttgggact

SEQ ID NO: 212 - DNA, 427 bp, Arabidopsis thaliana
attcgactcaaaacaccttgatgagagaaggtcgattaacattgatgttcctgcaaccgctatgctttgcgttcagctcaatactttacattatgctgttagtcaactgagcaagttagaagacagcatgtggctacgctggatagcaaaaaaacctcgtgaaaagattgtcatcagaaaatctatggttgagaaatccaagagttttaaccagaaggaatcttttgaggggagtagaaaagatatcaatgcagctctggatcgtatttgcgagtttactggaaccaagattatcttctgcgatttaagggagccatttattgaaaatttgtataagccaaatgtttctcaatcaagattggaaggattaatcgaagccctagacacggaacttggacagctatgtagtgtcataatggagccattg

SEQ ID NO: 213 - DNA, 427 bp, Arabidopsis thaliana
gttgagccagctagtccagattccgacgaagggatctcgctgctcgagtttcacggtaacggtgaccgttcctggcagttaaatttcgatgatttccaggtttcaccggaacacaaggagaagaaatctccgagtaaactacacaactgtcttggttgtttgggtccggaagacaatgtggcagattattaccagcagcaagtagagatgcttgagggctttactgaaatggatgaacttgcagaacgtggctttgttcctggaatgtcaaaggaagagcaggataatttggctaaaagcgagacattggcgattagaatatcaaacattgcaaacatgcttctttttgctgctaaagtctatgcttctgtcactagtggctctttagctatcattgcctctacattggactctcttcttgatcttc

SEQ ID NO: 214 - DNA, 427 bp, Arabidopsis thaliana
attgaaggcagaagagtggaagctcataagacggttaggataaccggtgttgttgttgagatcggttcgtttcggttgttggatacgaaggatttggataaggatttgagattagggtttttggaattgagaagtgttgctgaggttagaggaaggattaaggttttgggaagaaagagatggaaagttagtgtgatgagttgtaccatgagactaaatttaaccggtcggtttattcaaaatttgttatgtgaatagtagtgagtgaatgatcggttttatgatccggtttaagaagatttatttgtttgttgttgtttttttgggtgttttgtgtttttgcggtattgtaattgtaatggtctttgtctataaagggaacatcaatattgtagaaaaagtacaaaattgattagtataaaaaaaa

SEQ ID NO: 215 - DNA, 427 bp, Arabidopsis thaliana
aacagttccaacaacggcaagggttccagaataggcagcaagagccttccatgtgaaggacaaggagagtaacagcattgacaaagccattccaccaaagcttgtcagtaaaagacttttccttcccattttatccatcaacgatgaagcaacagcagtgccaaagacatttgatgctccaacgagagcactggctgcaacatctgattggattcccgcactacggaataccgatgtggagtaatacacaactgcgtttatcccggctaactgttgaaacaagaagagagccgcacctacgcttacaactttccagtagcggctgctgaatagatcaaaccatcctgcctccggctcagaagaaccttggccagaggctgataagtcgcgaactagttcaaccactctttctttacctgcccgggcg

SEQ ID NO: 216 - DNA, 427 bp, Arabidopsis thaliana
ccacgcgtccgcacgcaactttctttcaaatacaaaaccaatcatctcgattcatccaacccgcgaagacccagaaaccaaaatcgaagacccaacaaaacccacaagtcgaaatctcgaaatccgttgagagtttgttcctttttttgtttgctcggagatggaggctttgccggaggatgaagagtacagtttcagggaagtagtgttgccgtctttgattccggtagtgccggagccggaacttgagagagagagcggagagaggagaagaggaagagatgttatcgtagccgttgatcatggtcccaatagcaaacacgcttttgattgggctcttgttcatttctgtcgtctcgccgatactctccatcttgtccacgccgtctcaagttcgttctctcttcaatgtgttaagaacgatgtt

SEQ ID NO: 217 - DNA, 427 bp, Arabidopsis thaliana
caaagatggcatcgttttgcagatcagcgttaatggcaggttccagaaacttagtatcaagatccagaaccgtaactcaaaagtccctcaatcttaaacccacaactacttcatctcctttcgcttcaatgtctcaatccatccctcgcgcttcgagggttctctctgctttgggaagtgttgaaacgatgattccacttcacagtgccgttgcttcagctcgtctccggtcaagcatcgctgctgattcctcttgttggagcttgctttctcagggacttgcaacgcctttgtgaccccggtctgctggatcgatataaggcggaaataatcaatatattacaatgaatgaacaagaatagtgtttttttttctagttcgaactctatcgtcaatgtattgttgtgtggttcacaaggacttgttg

SEQ ID NO: 218 - DNA, 427 bp, Arabidopsis thaliana
tcatataaagaggtggaatttgatttatatgaattttgatttctgggtttacgaaattgatcggtttctgggttggaacttgaagttatgagcaatcttcgagctatctgtagaccatactctgtgttctcttcgattgtgtgttgtagtagacatcaaagtcgatcactttttagggtttcgattaaaaacgtcgcctttagaaaccagagttcgaattcgtcttggtttaggtctaaaaattcgaatctttggtttcgtttgaatcagaggaagactctagttagagcatcgaattggagccaagagaaatctccttacgatactctcgagttggatagaaatgcagaggaagaacagattaaggtagcatacagaagattagccaaattctatcatcctgatgtttatgatggaaaggggactc

SEQ ID NO: 219 - DNA, 427 bp, Arabidopsis thaliana
cctaatctctcttcttggcttgaaagcaatgatctccctcctgagtcttggagccttagccaacttcttttgggtggattgatgatgggagaggaagagagattggagatgatgaaccatcataatcatcatgatgaacaacaacaccatggttttcaagggaagataagattggagaattgggaagaacaagtgttaagccaccaacaagcttccatggtggctgttgacatcaaacaagagggtaacattaacaacaacaatggctatgtcatatcttccccgaactcacctcctaacaaatcttgtgttacaacaactaccacaacaaacctgttatgaatgaatgagaacagattacatcttcttgtaatttctctttacctatttcagttgtaaggatcattttaatgaattaagtttcttt

SEQ ID NO: 220 - DNA, 427 bp, Arabidopsis thaliana
caatcgtaattgattctcttccggcggaggattttcttcagtcttcaccggattcatggatcggagaaatcgagaatcaattgatgaacgatgagaatcatcaagaggagagttttgtggaattggatcagcaatcggtttcagatttcatagcggatctactcgttgattatccaactagcgattctggctccgttgatttggcggctgataaagttctaaccgtcgattctcccgccgccgctgatgattccgggaaggagaattcggatttggttgttgagaagaagtctaatgattctggtagcgagattcatgatgatgatgacgaagaaggagacgatgatgctgtggctaagaaacgaagaaggagagtaagaaatagagatgcggcggttagatcgagagagaggaagaaggaatatgt

SEQ ID NO: 221 - DNA, 427 bp, Arabidopsis thaliana
  misc_feature (1)...(427): n = A,T,C or G
tttttttttttttttttttttttttttttttttttttttttttttttttttttttttttttgagnnncaataagttcatcatttatcatcatcatcatcaacaacatagatcataattaaacacaattttatacaatatacaatttggagctctgataaacaacaactataacaaaagtgcccaaataaccatgtatatacacacataagcgatacttgttatcaactttcgaatttccaatagcacagaacttgagcaaatctagaagattaagagatcctccttcacgttgtaacccatcttctctagatttggctgcaacgcaaactgaatcataggcggtggtccgcatgcgagtgctagcgattcgccttccaaaccttcagggatatgttccctaagcacagcttcagttcggacgcgtgg

SEQ ID NO: 222 - DNA, 427 bp, Arabidopsis thaliana
tatttcagtaacagatgcattatattggtgaaggaattgaatttctcatataacataaagaaactagaagaaagaaaatacatatacagattttctttatttcagaatattcttaataaccccaatagtagtaattcgcctagacagggctcgcatcgccggattgaaggtacgaacgctcaccggcatttttcttcccagtaaataaccgatcaaacggtgaccttattgctagaagcaaacctttaggtgcaccagcacgatcctgataattaccactagcgttgataatctcatccggagactgtatcgaccgggtatggtatggaggagttatagaaaatggtctccggtccaaccgaccgtcttgatcaaaccgttcaaagtagaaatagttcttttcagtccctaggcttccggttctgaa

SEQ ID NO: 223 - DNA, 427 bp, Arabidopsis thaliana
aaaccaaatctcacaatccaaaaaccctatatcctaacaacaaaccaagatgggaatccaagctccacgctggacctaaagggtttcaatcttctagaacctctgaaaaacccggccggccagacccggacccggaagacgatcccccgatacctcaagaagtgttcgagaggatgatggggaggattgtggtgtctgtgggaacaccactgggcttgggagtggcgatcttgaaagtactcgaagttttgaaggatagaaacgtctgggacgtgcctttgtgggttccatacttgaccacactcgtgacctttggttcgtcggctcttgggattgcgtacggaagcttgtccacaaacctggacccggccaagactaactctctttttggactcaaagaggcaaaggagaattgggtagagatgtg

SEQ ID NO: 224 - DNA, 427 bp, Arabidopsis thaliana
  misc_feature (1)...(427): n = A,T,C or G
ttttttttttttttttttcaaaaattctgcaacttttcattgaggttttagttgttgcaagtttcgattaaaccaaacggatcatatgcaccagcattaacaaaaaacaaccgatattttgagactcaaaaccaaaaaagattacgactttagaagtcccaaaaagtttgcagcttcgaaccttttcatcaaacactgccttggccaaagtcttgaatcctgtcaccacgaacatttaagctctccattgcattctccaatccagaactcatctcagccaacacatgaggatcattgtaatgttgaacagcttgaacaatgctcctaagtttcttaaacggatcaggaccatcaaaaacctcannnnncacaaaaancccatcacaacctagctgcatcatcaaagctgcatcagcaggagtcgtga

SEQ ID NO: 225 - DNA, 427 bp, Arabidopsis thaliana
  misc_feature (1)...(427): n = A,T,C or G
gcggccgcttcaagttgagctacgccttagcatggcgctctacgacttcttcccaatggtttcagaatttgctcgggaaatcagcgccggagttttcatgaaacagagccaagtccgtataatgggagctaacgcggccagcgaacaacctgagaaatccattgttctaatcgatttagtaccgcttggagataaattcgataacatgactgnaatgctgacttaccagagattctggagtanannngtctatatagatgaaccaatctttggcggatacgacgtgatttacgtgcgtaatcctggtttacccgcttccccgccaacttctggtatgaccattatagatcaaggaccgtactctggtaataataacggaagggcggtcaaaccgctcggagttgatgttccaaggaagccgcgcaag

SEQ ID NO: 226 - DNA, 427 bp, Arabidopsis thaliana
  misc_feature (1)...(427): n = A,T,C or G
gaaaccacacatcatgatgagattggtaattacaaggattatccttcagatgaggagccagcagctgaaggtgaaccaacaagtatattggatgaggctactcacactaatccagcagacgagcatgttgtggagagaaaagaggaatctacctcatctgaggattcctcttcccccacagatgaatctcaaaatgatggtagtgctgaaaaggaggaatcagacgaggttaagaaagtggaggattttgtaaccgagaagaaggaagagttgtcaaaggaagagttggggcgnnntgttgcctctcgttggacaggagagaaatctgataagccaactgaggcagacgatatccccaaagctgatgatcaggaaaaccatgagcacacgcccatcactgcacatgaagcagatgaagatgatggat

SEQ ID NO: 227 - DNA, 427 bp, Arabidopsis thaliana
aaccacataacaaagattacaaaatgatacaattatgaattctgaacatcactgaccaatactgtaaatgtaatggccatcccattattctcttttatttttatcatgtagaaacaagatacaaaaaagttaaaagactgttactttaggtcttgaacctctgagagatcttcccaactccatctctacactcctcagccattttcttcaccttatcgctcacctgaactgtcccttgctcaacatctgctgctgctccttttgccctcacaatggctgcatctctcatttccccagctcgcttccctaaattcactgcatattccttcaaaactgtaatccataaacgtattttctccatcacagtgaagatcacttcccgggactttccactcacggttccagccatctccttcagcttatccat

SEQ ID NO: 228 - DNA, 427 bp, Arabidopsis thaliana
agcaccgaaatcacgatccaaacggatcgggatccgtcgtcgaacaacaacggatcttgcgctgttgcttcctctaccgcttccgccgtcttcagaaagatcgagtttcaccctgcaaggaaacccttcaacggtttctctaatgggcgttccgattttaagatcgagactttgaatccttgctcctctaaccagcgactgttatctgcaccgtccgctaagaaacccgacagctccgatttgttggaacatgggttcgaacccgatcttacttttagcattaccttccgcaaaatcggtgcgggtttgcagaatctcgggaatacatgttttcttaattccgtattgcaatgtttgacatacactgagcctttagctgctactctgcaaaccgctgcgcatcagaaatattgtcatgttgctggat

SEQ ID NO: 229 - DNA, 427 bp, Arabidopsis thaliana
  misc_feature (1)...(427): n = A,T,C or G
cttgctgctgctgctgctgctgctgctgcttccccattccttccattgctccggtttgccaatcatctctgtaatcgaatgctgccatatcgaatggtgtcgaatcaaacaccanctggaaccgattgttaaccccgttgttcgtcccttgttgcataaacatttgattgccactgttgaaattcagctgctgattctgagctgcttttgcatcaatgaccatgctttggttttccatcaaagtaggaggcgtttggttgctttggacatttctgtcgtacatggccataagctcggtgatcatcttctgcccgttttccgnnnctccaacgcccgataggtcgatcggttggactggttgctgaggaactactagtttcattccacccatatgaaacttggatgctccatacgctaaacgattgtc

SEQ ID NO: 230 - DNA, 426 bp, Arabidopsis thaliana
ttttttttttttttttttataaaatatttacatattatattaaaaagagataaatattcaatggacaacagctaaaagatgcctctgtgttctctgaactaatatcgacaaaactcaaaagacagaaaaaaaaaaaacataaacacaactctagttcgctacttcaaatccaacggcccacaatttttctcaattttctaaacataccccaccattttcagaaattaccaaaccgcccaagaatcttcaccgtccgttttcggatcttagatcaaacggcgatcatgaaagcgagagatagacctcgcattgtattgaagtcttcccaattctaaaccctggaacaaccgtgaacgcgacacgtggctcagactccggcgaactctccgccgccgggaaaaacgcttcttctgctacactcttcat

SEQ ID NO: 231 - DNA, 426 bp, Arabidopsis thaliana
  misc_feature (1)...(426): n = A,T,C or G
aaactaacgaacaatatctcaaatccaatctcacccgaaaagacttataaacatatattttcctaagccttagacataaacgcaccatcacacatagccaaatgtcaacacaagaaaaccagaagagaaaatgaataacaagacactaaactcacacaaacgagaaaaaaaaaggaatcaagaaaaacagagaagctgttgttattgctcctcctgcacttccacttcgtcttcttcatactcatacccttcttcctcatcagccgttgcgtcttggtactgttgatactctgataccaaatcattcatgttgctctctgcctctgtgaactccatctcgtccattccttcacctgtgtaccaatgcaagnnngcttttcttctgaacatcgctgtgaactgttcgctcacacgcctaaacatctc

SEQ ID NO: 232 - DNA, 426 bp, Arabidopsis thaliana
ccttttttttttttttttgcagaagatagttaaaaaggatcagaaaaggaggaagagaatcgaagccgctggaatagaatacgaatgccctgagcttgtaagtttccgattacacaattctatacactacatcttcaacattgaactaataactgcatgttttgtgtcactgcttcaggttggaaacacacagccagtcccgaagaggatcaagtttagtgaagaagactaaaagctgaagctgaacaacacttttccgataaccttttttgaatagaaatctgttctgttgtactcttgatattggatcaataactaaactttaaagtttgcaatgaaaacttctgtttcaatgattcagattttctgtatagcatcaagatactttcccgagacagcgggtgttagattctctctgttgaaacc

SEQ ID NO: 233 - DNA, 426 bp, Arabidopsis thaliana
ttttactttctgttttcctcttctctactctggaacaacaactacacacacacacacaaaaaaaaacaattttctgtctatatatatattaaggatccaaattagggagagaccaaagaggaaattaataacaatcaatccaacaacgaatggagattgaagaagcgagtcgtgaaagtggacatgttgtgtgcggatcatggattcgtcgcccgaagaaagtaaactgggttcttatcgctaaagcttccaaacgctgtggctcatctgtttcttctcctgctctcctcaacatcttctcttttgaccccattactgcttctctttcctcctctcctttggcaacacacacgcttaaggatagtgatggtgatcctgtggctgtttcagtgcaccctggtggggattactttgtttgctcaacct

SEQ ID NO: 234 - DNA, 426 bp, Arabidopsis thaliana
cggccgccttatacataacaaacatacacattcaagtccatgagaaaaaggaatggacttcagctatgcatcaaggtcttaattcttcttccccccaacatttcacttcttatttttatgtaaacttgtggaaattttttcaataaataagaaataataaaattataatagtgtaagagctcgagcatacactgtttcaagatctggtcttgaactttctttgagctttcaagtcgatcactatgattgagatattgtctttgcttcccatttgaatagcgagtttggagagatattcagccgcagcttgacacgcttggtcttctcctacacctctctcagctaaaggcaatgctccattcttcttgtgccaagccaagatccgcctcctcgcaaaatcgcaagcttcttggttactcattacgt

SEQ ID NO: 235 - DNA, 426 bp, Arabidopsis thaliana
tatggcattgaacacggagaaaaaagagtaaaacagtctactgagaaaaacttgaaagctaaagtttctgcgaaagctatctcgaaagaacagaagtcattgacgagaacaggtaagcagcaaattcagtcaaaagaagaaacatcatcgaccatctctagtaaattactgaaaactgaagaaattatctcatccccgagtcaaagtgaaccgtggactgtacttgctcataagaagcctcagaaggactggaaagcttataacccaaagacaatgagacctccccctctaccagagggtaccaaatgtgtgaaagttatgacttggaatgttaatggactgagaggattgttgaagtttgagagcttctctgctctgcagcttgcccaaagagaaaattttgacatcttgtgcttgcaggagact

SEQ ID NO: 236 - DNA, 426 bp, Arabidopsis thaliana
tgaattccagccagcatggcagcgtgaccaaccgctgtaacaggaagaagcattagaataccgatgggaataactgacgccaggtcagtcatggttctgcgcagggctttcttttcttttcctgttaattcatcaccaatcagagacctccgaagtagctgcactgcagctgctgaatcaatggcaagaagttgagtaccttgccacacgtccgtggtggcttctcttagcttttgaagagttttctccatcatgttttccttcttgggagtctgaaccaactgaacactttccgttctactgcttgattgaggtgtatcctcagagattatttcctcctcatctactgactgatcagtgcttcttttgacccgcttttcgagttctattagctcgttccttagaatttcgaatcggctgatctca

SEQ ID NO: 237 - DNA, 426 bp, Arabidopsis thaliana
  misc_feature (1)...(426): n = A,T,C or G
gaaaaaacgagacactgacgcaataatgacacagaccagaagagagttttttagttgtttttaaattaagatactcctacacgacattgtacttgcaaatccagaatgatcacaccataatgctttgttcagacgtactcgttgactcgaaaggctgtcactttcaaaacgaaatctctggttctgagcagctcaaacacacagacgtctccttctcctaagttgttctctagagtgaattcgtaccatccttgactgaatttggctctcccggctttgtagagacatcgaacaggccattgtttctccncatnctggactttgatgaacccggagatcccacttaggtacttctcagcaaacccagaaggaagatacatgatgcaacctctgtatagataggatggtcgcagaaccactctgaag

SEQ ID NO: 238 - DNA, 426 bp, Arabidopsis thaliana
tcgagcggccgcccgggcaggtagcgtttactgtgagtctctcaaagaaaccaaaggcagagaaaagagataacacacacaaaaaaaaatggcatcaacctcactcctcaaggcttctccggtgttggacaaatccgaatgggtcaagggacaaagcgttctcttccgtcagccttcttccgcttctgtcgtcctccgcaaccgtgccacctccctcaccgtccgtgccgcttcctcctacgccgatgagcttgttaagacagcgaaaactattgcgtctcccggacgtggaatcttggcgatggacgagtcgaacgcgacttgcgggaaacgtttggattcgatagggctagagaacactgaggcaaatcgtcaagctttccggactttgctggtctctgcaccgggactcggacagtacctcgg

SEQ ID NO: 239 - DNA, 426 bp, Arabidopsis thaliana
cttttttttttttttttttttttctggagagttacaactaaataaaagtctttcttatatcattgcaacgtagttcatatcagagcctggactgaataatacttacataaaaactagagaatcacctggtggaggaagatgtggtggttaaagatctgtctgaagtgttgtctatgatgctgcgctgtaactaattgtgcctatgttccggtgtgctgctactgcaaccgctgcagctcctgctggaccaaactgtgattgtgcctgcaacagcttagcatcaatggccatatgtgtgttgttgtttaattgatctgtcttcgggagctgtggttgaaagtaagggtttgggtggttcatagtctcaacgtctgcttggttagttgtagcagctggtggctcagtgggactgaattggtggacagg

SEQ ID NO: 240 - DNA, 426 bp, Arabidopsis thaliana
tttcagcccaaagaacactttttaattactagtaaagtttaactaacggttaataaacttacatcagacaatattacactttttatcttggctgcttcaatgtctccgcatcgttcgttttaccggtgaaagaagcttcttagctttcctctttcaagcttctcgagaagcttatcggcgcccattacttccatctccgacagcttcttcagataccctattgctccgtacgacaccatcattttcttactcttctcgcttcccgacatccccaacagccccgccacggcgtacttcttcgccgtgtttccagggtttgaatccaataacatcaccaaattcgtcagaacgctcttcccgtctttcttcagttcccgtcgaatccttccttccgctaccaatccagcgatcgcctgagccgccgct

SEQ ID NO: 241 - DNA, 426 bp, Arabidopsis thaliana
aaagaagcatatatttcattagagaaaacaaagatacatataacattgcaacaagagaaacatatagtataaagccgtaaactctcttcaacgaaagcgagagagtgtgactccattccctcaaaacctaactttggctaaaatatttttcttggaagaaaagttattgaaactgaacaaacacaaaccacgtagaaaaatcccggaatatagaaataatatcttcaagctcttcacttggcactaccgagctgggagcggataagcttagccgcgtcaaccatggctttaagtgctggtttaacctcagtgtacttccttgtcttcagaccacagtcagggttaacccacaagatgttctgctcaagaaccgcaagcatcttgttgatcctgtctgcaatttcatctgtggatggtattctcgga

SEQ ID NO: 242 - DNA, 426 bp, Arabidopsis thaliana
aaatcaaagttttgttaatgcaccaaagtgagagagtttagaccaatcacagaagttatggccattacaacaaaaacacataatgtgagaagatagcaaggcaaaaaaacgctcacagaaaccaaaaagtttatatgtttctttaatggtaaaatcaaagacaaaaacataattcttcgcttctgttttgtggtcgaatcaatggaggttttctttttctattgtctcatggcaatctccaaggaaaaacttctattggtaagtaagtaaggttaggttcttaacctgacctcttgaaaaaggtgaaagccatggctatagttgcaatggctccaaccacagcagctccaatgtaaagctcttctttgtcaagaggctggaaccatatggtacacttttttacttctttcttgattggctctggct

SEQ ID NO: 243 - DNA, 426 bp, Arabidopsis thaliana
cctctagagcggccgccctttttttttttttttttttagggttcaaagtttaacatgatttatttcacaaaacaaaaggaatatatacaacttaaacattatcacattcacgataagtgcttaccataaacaaagtggttcaaggatcttgcctctgaaaccatgtctattaacttgaagaatagatcacttcaaatattcaattaactatatctacccggcaacacgttccttgccaaaccagtatcgcccctttctgagctcttatgtctttcatactcaagatcatcagtaggcagctcataccgacaaaccgggcaagtattccttatccccaaccaaggtatgatacactctccatgatagaaatgactacaaggaagcctccttactttctcctccactaacatttcatctttgcatacc

SEQ ID NO: 244 - DNA, 426 bp, Arabidopsis thaliana
  misc_feature (1)...(426): n = A,T,C or G
cctctagagcggccgcccttttttttttttttttttttttttgattcaatcttttcttttattgccaacaacaaaaacagaaggctacacaatatcaacgaaacgaagaagattagagattagtcttcttctcatgttacatagaggacattactttgattcactgaacaagcacaagccttccactaccaataccttgtccaaaatcaccaccaccaccatcatcatcttcttcttcagcattcttaggcacagtaacaatcaaatcaccatcaacacaagcaacagtaacaagctcaggcctagttgattccggtaacctaaaacgccacacgtcaagctctaattcgtctannnacaaaccaagagaagaagacccatttgtcctcacaacgatcttggttataccaggatgaatctcaacca

SEQ ID NO: 245 - DNA, 426 bp, Arabidopsis thaliana
gcggccgccggagtagtgaatctcggaattgttgaagaagacggtacaccggaatcaattgcgattttgatttatgggaacggtttgcgaatctgtagcgacggcgaaatcttcgacggcggtgatgagctccattccgccttttctgagcaaaacgtacgatatggttgacgatccattgacggacgacgtggtgtcttggagcagcggaaacaacagcttcgtggtttggaacgtgcctgagttcgccaaacagtttctaccaaagtatttcaagcacaacaatttctccagcttcgtcagacagctcaatacttatggttttagaaaagttgatccagaccgctgggagtttgcaaacgagggctttttaagaggccaaaagcaaatactaaagagtattgtccggcgaaaacctgcacaagt

SEQ ID NO: 246 - DNA, 426 bp, Arabidopsis thaliana
agttccgatgacatcatgaaatttctcgacggcatggctagctccgacgatgttctttttggcttcctcgacgaaggaaaccactcaccggaggattataacttcgccgccggcgacgaatccgaagttgacaacgataccaccgattgtaattcagaagagaacagaaaattttggcaagaacacgaacaacttctccaggcgacactgtataggacaagttcaattgagacaaagataagacaagcaactaaggaagcgttgaaagtagttagatcaaagggtttggtatgtgtctgccggagaccggttaccgacggttgtcgtagctgtttacgcggcgaagtatctagcctcctccgagaagctggctatgattgcgtcatttccaaatctaagtggagaagctctcatgagatccctgca

SEQ ID NO: 247 - DNA, 426 bp, Arabidopsis thaliana
gattctgaggagcttcaattgggtgtggatgagagttatacattgatggtgtcgaagaagaacgagcaatcgattgttggagcagccacgatcgaggctaatacagtttatggtgcacttagaggattggagacatttagccagtttgtgtgcctttgattatataaccaaatctgtgcaaatatataaagcaccatggtatattcaagataaacctagatttggataccgcggtctgctgatagatacatcaagacattatttaccaattgatgttattaagcaaataatcgaatccatgtcctttgccaaacttaatgtcctgcattggcacattgtagacgagcaatcatttcctcttgaaactcctacatatcctaatttgtggaaaggagcttattcgagatgggaacgttatacagttga

SEQ ID NO: 248 - DNA, 426 bp, Arabidopsis thaliana
ttacttcaagagaggtgataatcaaagggcttccacggcggagaagagaatggatggtcacgaagagaaacagagtctctgctgtcacggccatgattgtggagccactttctgttgtttcttcttcagcaattcagattcatcaatggtgggaacaaaaccctaattcgttactgttaatgacggaggctactggtggttattcgttggctagctattatacgtctttgggtttgtttgttatctctgttcctggtctttggtctctaatcaaacgctctgttaaatcaaaggttcgaactttactaattacaaaaccctaaatttcacttccaattcccaatttcttcgattttgaaaaagcttgaatgcaatgttgaggatttgtagatagtgagaaagacgtttgttgttaatgacgtcaag

SEQ ID NO: 249 - DNA, 426 bp, Arabidopsis thaliana
cggccgcattcgaatctgatcttcgttgatctctgtggaagaaacagataagagaaaatcgcatgaatttttttagaaaactaggttttaatccttcgattgcaagctacttcactaatacgagtcttctgatctcaattcttagtttttctcctcaattgccgatttctctctttcttttcgagcagaaatcgttagatcctttatcgctgtgtaatagtagtactaattttaataatcttgagagtaattactccgttcattgttgaatcatggagtccggaggcaaaactaatcgtcagctgcgtaaagctatttgcgtctcaacagacgagaagatgaagaagaagagatcaccttcagtgatagtgattggaggtggtatggctggaatttcagccgctcgcactcttcaggatgcttcct

SEQ ID NO: 250 - DNA, 425 bp, Arabidopsis thaliana
tcgagcggccgcccgggcaggtaaaaaagaaaatcaaagaagatagttttgtgattgttttctataaaaagtgcagatattttctttgtcctagagaaagaggtgataggaaaaatgggtctccaagagcttgacccgttagcccaattgagcttaccgccgggttttcggttttatccgactgacgaagagctgatggttgaatatctctgtagaaaagccgccggtcacgacttctctctccagctcatagctgaaatcgatctctacaagtttgatccatgggttttaccaagtaaggcgttattcggtgaaaaagaatggtattttttcagcccgagggataggaagtatccaaacgggtcaagacctaatcgggttgccgggtcgggttattggaaagccaccggtacctcggccgcgac

SEQ ID NO: 251 - DNA, 425 bp, Arabidopsis thaliana
catggctgatcgtatcatcagcatgaggaaacagcttttcgaggcattacgtactcgaggcactcctggagactggagtcacatcataaagcagattggtatgtttaccttcacagggttaaacccagctcaagtctccttcatgactaaagagtaccacatctacatgacatctgacgggaggataagcatggctggtctgagttcgaagactgtacctcaccttgcagacgctatccatgctgttgtcaccaaagccgtctgagaaactgaacaccaccatgacaccaaagcttcataataaagattttgttcttttctttctattatagcatttccggcagtgacaagataaatgtcgttactattattattgtttcatcccagtatcaataaagtacgcaagaaagcttttgtgctcaaaa

SEQ ID NO: 252 - DNA, 425 bp, Arabidopsis thaliana
  misc_feature (1)...(425): n = A,T,C or G
cgggcaggtccctgcaaaagtcgcatttgatcaaaccgtatggtctgcaatttggaacagtatctactttacagttttagggctcttgcgtttccaatctccagctgacattttcagcgaaatcaagacaacatttttgccaatgctcactgcaggctggaaactctggccattggcacacttggttacatacggtgtaatccctgtagaccaaaggcttctttgggtagattgtattgaactcatatgggtcactatattatcaacttactcgaacgaaaaagctgaggcgcaagcatcagaggaaacgaactccagttctcactcaagcaaggattaggtgatatcagcatgtngattctagattctatagactctaacaggaggtggatgaagaacacaagcacatatatactttttttttg

SEQ ID NO: 253 - DNA, 425 bp, Arabidopsis thaliana
ggaaaaaagaagaagaagaagcagagctgggtttagttttttcacgagaagcaaagagatcaataagtcagtgagcttttttctcgtttctgacgatggcggttgcgccggcaagagctcgttcagactatgattacctcatcaagcttcttctcatcggcgatagcggtgtggggaagagttgtttgttacttcgattctcagatgatactttcactacaagtttcattactaccattggtattgacttcaagataagaactgttgaacttgatgggaagcgtatcaaattgcagatttgggacactgctggtcaagaacgtttcagaactatcactacagcgtattacaggggagcgatgggtatattgcttgtctacgatgtaacggatgagtcatcttttaacaatattaggaactggatg

SEQ ID NO: 254 - DNA, 425 bp, Arabidopsis thaliana
ttttttttttttttttttttgtaaaatccaaagtagtaacatcacagtaaatgttgaaatcatcaactcaggaagtacaaagccaaaaagaaaaaaaggttacagattcttaaacttttattgctcagttaataaaagctgtgagagagaaaatgtagaagcaaaactgatgaaacaacaattaaaagcttgaccagaaagaaacatctgtgcttatgcactcggaaaacagatggctgcgtaaaatattccgagctcatagatcaacttcctctgagcaaaagacccttctggaattcgaacaatgccctatattctcttggtagttgtcctaatcatccaagtagtagtatgagcctgcagacttctgttccctgtctttggtcgactccaatttgttgattcttggtctgaaattggtggga

SEQ ID NO: 255 - DNA, 425 bp, Arabidopsis thaliana
accctcacacatggttagcgaagttttagcgaatgcaccggctattgtagaatgcaggaaaccacagcagggactcgaaaacgcactagcttgcagcttctgtctaccttcacctacaagtcgagattccaaactttatctacaaccaggatcttcaacaatgattattctaaatccaaaaacgagaagagatgcatgtaggcgatagttgcactataacaaaatgtggagtctatgtgattaatgatgcagctggcagctcaagtggaaacacgatgaccccacaatgttcttcaatggattcactgaagcttttagatggtaaaggtaaaaagagattaagagttaactatgctggtttaaaacaaagagaaaaagctttatttctttacatagcatgtttgctcggtggtgagaaggctgat

SEQ ID NO: 256 - DNA, 425 bp, Arabidopsis thaliana
  misc_feature (1)...(425): n = A,T,C or G
agagctccaacaatggctgcttgcgctactcactcctctctcatgctagcatacgccgccgcatccactcgtgcccaggaccttacccctactccatctcttttctcttttgccagctccagacccaaccacttgagcgtcccgcttcttctccttgggggttccagggaccggagatgtgctgctattgacagagcttccaaccacaagtttattgtctccgccgtggccgctgaggctgacctcgacacggaggaggacctggagcagaccgccaccgccgtccttgatccgcccaagcctaagaaaggaaaagccgctttggttctcaagagagatagaacaaggtctaagaggtttttgnaaatccaaaagctaaaggaaaccaaaaaggagtatgatgtcaacactgctatctctttgct

SEQ ID NO: 257 - DNA, 425 bp, Arabidopsis thaliana
tcgagcggccgcccgggcaggtacttgcataagagattacagcagcacttcctgagaattgttgtatcaacattagcccgattcctaccacgagggtgtatctatactttctctggaacaaatctgaaaaactcgactttgaatcattttccaccattttggtcattacttgaatttctgaggcttcacgtgaaatatcagcatctcttcctctaagccgaaacagtgaattttctagttctttatcggagccaactttggccagccatcttggagactctggcacgaagaataaaccgattacttgaatgaagcatggtaaagcacctaataaagccaacgtcctccaattgatgaagttcccacaaaaataaatcatggcgagtccagcgttttgaagaagctggtttgaaaacgtaaatgta

SEQ ID NO: 258 - DNA, 425 bp, Arabidopsis thaliana
gcccttttttttttttttttttaaggaaatagtactcttattaataccatagtcaccgagcttaatttgactctatcaataccataatcaccaaaagcttgatatgcataaatatatgtgtgcgtaaaacataaaatgtgtgcgctttatatatgtttcatagttcatgtgtgcgtggaagagctggatcataaggaaaagaagcacagagcgtgtcgctctcattctccaaaaatcttccaaggttggagttttaatgatgtggaaggaggagaggctggaagccgtggctgagacaggcttcccatactttgtccaaatccgagagaagaagggatgtgccacactcatgcgtttcccatccttctaaggcgtgcaatatgccggccactctagttgcactcatcgcctttctcggtaaccag

SEQ ID NO: 259 - DNA, 425 bp, Arabidopsis thaliana
gcggccgcaatgaagcgcgtgaaaaattggtttttcttgatggaacttctataccgaaaacaaggcttcagaaaaagaaaaatgatgaacaagttccggaagggtgggtgcaatgtgataagtgtgaagcatggcagcatataatttgtgctttgttcaacagccgaagaaatcatggagaatccaccaagtacacttgccctagttgctatatacaagaggtggaacaaagagaaagaagaccattaccactaagtgctgttccgggggcaacaagtttaccagttacttctcttagcaagcatctagaggagcggttattcaaaaagttgaaggaggaaagacaagagagggctagacttcaaggaaaaacttatgaggaggtcccaggagctgaatcacttactgtcagagttgtggcatcg

SEQ ID NO: 260 - DNA, 425 bp, Arabidopsis thaliana
agccattatttgatgtaacgttacattaaaactgaaaacacacaaaccaaagacttattcaagaacacactaaacacgcatacacgttacgatatgttgtcgtacggaatattagacgacggaaagaagtaacaaaacacaatagatcgacgattgagtcatgcatgagaatcgattgatggatcagcaatttctggtgcagaagcaacgacgacggaatccacggcaatcacctccggggaagccttcgttgtggcacacgttttcgcagtttgtatcgctcacgcatttacccttgaatctttggctctgcgacgcacacgtgcgtgcctcgaccgtgactggacccatccctgtggcgacgaatatcatcaccaagaaaagaacggctgagatcaaacgcatagagaacttcatgtttggag

SEQ ID NO: 261 - DNA, 425 bp, Arabidopsis thaliana
cttttttttttttttttgacaacaaaataggactttcaccattatgcatctatttgcatataccatgtagtcagaaactggcttacaatagaaattaaatgccttatgtttggtacatgagtcaagccaagtacttctccaacttctctacttcctctgtgcttccaatgtatagaggaaccctctgatgtatctcagtcggttggatatctagtactctcgaatgtccatcagaacctttccctccagcttgttcaacaatgaaactcattggtgcacactcatacaaaagcctaagctttccatttttgctctttgcgtcacgagggtacccgtaaatcccaccgtacaacaaagtcctgtgaaaatctccaaccaaacttccaatgtaccttgcggagtaaggcttcccagttggaccaggg

SEQ ID NO: 262 - DNA, 425 bp, Arabidopsis thaliana
tttttttttttttttttccccaattgcaaaaacattaacttcatggaaacagtagttacaagcaagagacacaatacaagttaaatgtttgtgttttgagaagatgtcttggtaaaggaacaaaatttcatccagatatgaatcatttacagttaaaaccaaaagatggaacctttccgacatttgagcttccatatgctcaagcaagtctctgttctcgactcctgatagcgtcttcactctgtttttaagttagtgagaatgagttccgctaatatatcgacccatgtgtcaggaacaccgggtaggcaccaatgcatacagtcttgtccccatattgccaccgcgtcctgcttccctaaccagatcgctgggtgggcatctgctctgaattcgcttagatgggtcagatcaagtaacttgat

SEQ ID NO: 263 - DNA, 425 bp, Arabidopsis thaliana
  misc_feature (1)...(425): n = A,T,C or G
gtctttctctgtttatcccaaagagaacaaaactgagaggaaaagagataacgaacaatgtctactactgtctatagcctatcttttcctcatttgttaacattactttacgccagatacagcagcatgtggattacatatatgtatannnttatagtnnttattcatatcctgtaggctgtctttgcgtcagttatgctttgtgtccatttcttctttgtctctttttgtctcttcgatgcaagcatctggaacgggttaggccctctatagctctcctctttaatccttatcttctttttcttccctcggtcatattcttcatcccactcatccgctacataaccaatgctgcttgcgccttcactcttngatcccctcttctgagaagctgaaatttcctcatcccatttggcaaccactgt

SEQ ID NO: 264 - DNA, 425 bp, Arabidopsis thaliana
  misc_feature (1)...(425): n = A,T,C or G
tcttacatattatgatacatacattgtcatagtaattattcaaacaacatcgacaatcttcttgttgtccctaaggatagtctattaaatcattccatcgatttcttggaagtcatctcaacatcatcggaggacttgtcctcctcaaagtcttcaatcggtaaaccgaccttgtaccggtatccccgagcacaataccaaaagtaaaccagattaaccacacccaaaaccgcaatcagataatagaagtaatccaattttcccgcgttgagattcttgtttagccaatccggacgatcatgcccaccggagaatttatgaacgacagtcacaaggaaactactaaggtagctcgaaccggcgaacgataannngaagagagaattagcgatacttctcatgtgctctggaaactgactgttgaa

SEQ ID NO: 265 - DNA, 425 bp, Arabidopsis thaliana
cgtatgttacaacaaaatgagaaaaatacagccgagagagagattacgtaaatattcttacactaacaacccaacaaactctctaccattcgtgaaatagtaagcaaccaagtgggaaaaatggaatatataaattatatttacgttggggctgaagggtataaagaattttgatttgagaatgtgttgttgcttcatatcatctccgtggaggatcctgaatcaggttcatttcaactcccacgggttgggattctctgaaagttccaagcttttcagcctccctagctatccgaacatcggaaggtctgtaatactccactagaaacttgatggcgaatctaggaagcaatgatgtcacaactattgctagcaagcagaaccagaacatccatgtcttgcccacttggaaaattgcccagtaa

SEQ ID NO: 266 - DNA, 425 bp, Arabidopsis thaliana
ggccattgatcatccataccatacaatcttgcagcttctggctttggcaaacggtgaccgtatcaaggataaccaacgcagtagaaattcttttgtggttgatatggataaaaagcttgcagcagagcatctcctgcaggatgtatcacattatcatgggcctatgattagacaaatgaaacaactggtagatatctacatcaagcttgcagagcttgaaacaaggagagaggataccaatagaaaggtagcactaccaagagagattcgtagtgtgaaacaactggaacttgtacctgtggtgactgcaacaattcctgttgatcgtagctgccaatacaatgaagggtcattcccgtttttcagaggtttatcagattctgttacagtgatgaatggtataaatgctccaaaagtagttgaat

SEQ ID NO: 267 - DNA, 425 bp, Arabidopsis thaliana
  misc_feature (1)...(425): n = A,T,C or G
gaaaaaatcgagtctctacctttcaaagatgatgtcaaggatgaagattttgaatccgatttcgaggaagcacattctactgacgaagaacttgaggatttgtacaattctcccgagtatgtagctgaaaagatgaggaagaatgagtttttcaacatggatgataagaagtgggatcacatgattagagaaggtatccaacatgggtgtcttactgatactaaagaatgcgaggagattcttgaggatatgctcaaatgggaccagcttcttcctgatgacttgaagaaaaaggttgaagcaaagtttaatgagcttggagatatgtgtgaaagaggtgaaattgaggctgaagcagcttatgagctttttnnngaatttgaagatgagatggtaattcagtatggggatcagatggaagctga

SEQ ID NO: 268 - DNA, 425 bp, Arabidopsis thaliana
tacttaagaaagaagggaaagagaagtttggggaagcttttaagcaatggcaagaagatccggcgaactttatcatcgatggtcattatcccgtaagagagttatggtcacgtgctagaagctgttggcctggtattcttgctcatgagagcaagtctgttctcgttgttgctcataatgctgttaatcaggctcttctggcaacagcaattggactgggaacagaatattttaggagtttgttgcagagcaattgtggtgtaagtgtattggacttcataccaagagctgacggtggatctcctcacgtatgtcttaatcgactaaatcagattcttgagttgggtgtaaaatgttagaggtagtcaaaattctgcttactgtctttgtagtactaatgcagacacctaattcgcctctagctg

SEQ ID NO: 269 - DNA, 424 bp, Arabidopsis thaliana
  misc_feature (1)...(424): n = A,T,C or G
tattggtaagatttttatttttatttctacaaagccgcaaatacaagaccaaaggaagtgtcaaagtgaacagctgaagtagcaagtttcacgtacaaacaccaaactcgaggagggactattcagcataatttatacatatacatgtagatacatgtattgtgtatttatatatatgnnnggttttatagtgtaggagggatccagatatagccgtgagtctgaagataaccagctttctctagtagctgatcagcttctttcggtcctcggcttcctggtttgtatgggattgactttacttctcctttgtcgatcctgtggagtagcggcgtgaagatctcccacgcaacctttaattcgtctctacgaacgaaatgttgttgatcgcctttgattgtgtcaagaattaagcgctcgtatg

SEQ ID NO: 270 - DNA, 424 bp, Arabidopsis thaliana
agcggccgcccgggcaggtactttcgagagagcaaatttattcatgttacaagtcttgatttctgtttactctctgcatttgctccgttttgggtttacaacgacatgaccacccgaaaatggtttgataaaggcagttggctgttaccggtatcggtgattccattcttgggaccttctttgtatctactcctacgaccagcagtgtcagagacgatagctcccaaagatactgcatcatctgacccaaatcaatagcaacatcaactttctcttttgctcgatgacaagactattgtccagaagccccaggaagatttcacaggaccgaccatcatatttctgatgcatgaatgctgatgataacattatgaacatgataaaccaccaacgtcacaaacgtattctagaatacaaaacctaa

SEQ ID NO: 271 - DNA, 424 bp, Arabidopsis thaliana
gcggccgctctgaaagcagctcgaacatctggttcgctgaatctttccaatcgttctctcaaggatgtacctactgaggtatatcaatgtttggaaacgaccggagaaggagaaaactggtgggaggctgttgatttgcagaagttgattttggctcataatgacattgaggttttaagagaagatctgaagaaccttgcctgtttggttgtgctaaatgtcagtcacaataaactctctcaacttccagcagctattggggagcttactgcgatgaagtctttggatgtgtcctttaactcaatatcagaacttcctgagcaaattggttcagcaatttctcttgtcaagcttgactgttcaagcaatcggcttaaagaattgccagattctattgggagatgtttagacttatccgatttaa

SEQ ID NO: 272 - DNA, 424 bp, Arabidopsis thaliana
cggccgccgaattacatggagaaattacatcaagagaaccaaaaaatcaatgaagcatttttttgtataacacaaatggtaaatctgtttctaaacatcctttcatcgctgcagctacttactcttgttttgactcatcattataccaattccatcaatagcggatcaccttccgccatctccctcaccaatttaatgaaatcttgttcgttcgagatgctccaaggatgaactgcaggtgcttccgctgaatacaaactcaaagaagagtttagcgaagctggttctgacttatataccattgagcctagaaccgggtcaaaattctgaggcgaatccatcgataggaagaacataggcacagcaactttgtaatgcaaatccatatcaccaacgagattaacaagatctgtaaagtctgaga

SEQ ID NO: 273 - DNA, 424 bp, Arabidopsis thaliana
gggttatcttccatcttcactcctacatcgctcttcgtcaaattgaatctctcactacttgttgctatctcctcgaatttcgacactatctcttttgcatctttcttcgttgtaaacttcgattctgatctctcttctttctcaaacaaacccgagagatcgaatccttgagacagcgaagagatcaagtcaaacgcgttgtaagacatcggttttacggaaaaagctgcgtggacatcgctgatcagtgagtcgatctgatgactttcgggagatttaggcgtttcgatcttcttgaaacccttttgaaaccaggaattctccatgattttttcaatcttgattcttgaattagggttagggtcaagaatccgagacaacaacttcttgacctcgggaggaaaccaattcggacatttgaatt

SEQ ID NO: 274 - DNA, 424 bp, Arabidopsis thaliana
tggaaggatggtgaagaagggaggaaccttgagaaaaaggctcttgagtatctgaagaagcaatccaataaagtgaaacaaggtgttggaaatggagctacgcagaagtatgttaataagtataaggaagaatctgataagtgtattttggctgttgatttggctttgaatgaatctttcaagaatgggaagagaaaagcgaagattggtgctgaatctgagaagaagaagcgtctcaaaatatggaaggggaagagagctgttgaagatagtgacagtgatgatagcgacgacgaggaagatgagaaatctgttgttctaaacaatggtggtcatgatggtgattcatctggtaaatcttcatgcaatagtggttcagaggaagagaacgacgctgtaatgcaccgcagtttcgatgtggtta

SEQ ID NO: 275 - DNA, 424 bp, Arabidopsis thaliana
atgagggagcattgcagggaacagaatattaagtatttctatgatatcactgaccttggaaattttaaggctaatcctgactacaaaggtgtttgccatgttgcacttgcacaagaaggtcattgcaggccaggagaggttttgttaggaacagactcacacacttgtactgctggagcatttggtcaatttgctacagggattggaaacactgatgcaggttttgtgttaggcactggaaaaatcctccttaaggttccaccaacgatgaggtttatcttggatggtgagatgcctagttatttgcaagcaaaggatctgattttacaaattattggtgaaatatctgttgctggtgcaacttacaagacgatggagttcagtggtacaactatcgaaagtctgagtatggaagaaagaatga

SEQ ID NO: 276 - DNA, 424 bp, Arabidopsis thaliana
agcgtcttgttttgcccaacggttcgattttgaggtgtgagtactatgctctcccaactcgtgaccgtctctttgaggatcctcttcatgatggcaaaaccatgctcaagatttggaacttgaacaagtacactggagttattggagcattcaactgtcaaggaggaggatggtgcagagaaaccagacgtaaccaatgtttctctgaatgcgtcaacacgttaaccgccaccacaagccctaaagacgttgaatggaacagtggaagcagcccaatctccattgcaaacgttgaagagtttgctttgttcttgtctcaatccaagaagcttttgttgtctggactaaacgatgatcttgagctgactttggagcctttcaagtttgagctgatcactgtctctcctgttgtgaccattgaggg

SEQ ID NO: 277 - DNA, 424 bp, Arabidopsis thaliana
tcgttccggcgataactcaccgtcaccttcaccatcttccggtatatccgaagagattctctcccgttcttcggatcctcctttagagtttagtcctccattgatcgccatggtggtggttctagccgccgcttttctattcgtaacttactctcgtctcatctcccgccgttttctttcacctctattccgtcgttttagaaggtggcgatgccgtcgacgccgtctccttcacttatcttcagcttcctctgcttcaacttcatcctccgatctccgatcattttcacctttccctttcgactcttttcattactcttcttactcaccttacggattagacgattccgttatcaaaactttaccgctgtttctctactccgccgctgcttgcaccggaaaacccgcggtggggaaaacctcc

SEQ ID NO: 278 - DNA, 424 bp, Arabidopsis thaliana
ctttttttttttttgttttcaaagtaactcttataatataaactattttgttgtgaacctttaccttaggagtaattcatagaattgtttatatctaaaaaaataacatctccttcctttatatgatcccctatagttatatacatacaaataaatagattgactggaatttcagacatcggcccgacgatgatccatttttcaaaagagcgcaaatttttttacgtttacacatgcataagagttttttttatttatgtttgtaggaatctatgtgttatacaacattctaccaaatgggtcttatcgaatcgaagtttttaaaataaaaaaaaaaaggtgatatgattcggtctcagccgatctaaaaaatcttatttttttgaatatgaagaaataaagaagccattgcacttgccggaaa

SEQ ID NO: 279 - DNA, 424 bp, Arabidopsis thaliana
ctcgaaagaagaatgcctggaattagaggtccttcggaatactcgcaggaaccacctcgtcacccttctctcaaggtcaacgccaaggaacctttcaacgccgagcctccccgctcggccttagtctcatcttatgtcactcccgtcgaccttttctacaagcgaaatcatggtcccatccccattgttgatcaccttcaaagctactccgtcacccttactggattgatccagaacccgagaaagctctttatcaaagacatcaggtccctcccaaagtacaatgttactgctactcttcagtgtgccggtaacagaaggactgccatgagcaaagttaggaatgttagaggtgttggatgggatgtttctgctattggcaacgctgtctggggtggggcgaaactggccgatgttcttgagc

SEQ ID NO: 280 - DNA, 424 bp, Arabidopsis thaliana
  misc_feature (1)...(424): n = A,T,C or G
tttttttttgtaatatgttttgatgggtaataaagaaaatatgtttacaaanncttgaactcaagtttggtttcacatactcgctacattggaattgtaagtgagaacatttctaatcataactcacaatattaacactcactgagctatcaaaatcaacgccttgttcgttcctcagccacgttcactttaattgctctgccttccaaattctgtccatcaagagcagcaatggcaacgttaacttcattctcattcgacatttgaacaaacccaaacccacgtgaacgacctgtctctctatcagaaaccactcgggcatcaactactttcccatgctcgctaaataatcgttccaaacgaccactatccacatcccatggcaggttcccaacatagatcctaaacgcagcatcatatacac

SEQ ID NO: 281 - DNA, 424 bp, Arabidopsis thaliana
  misc_feature (1)...(424): n = A,T,C or G
ctttctcgttttcaccaccggactcttttgtatttacctcaccatgcctgccgctgaatacggcaagctcaaagttcctagaactatctccgatcttcgattgctcaaagagaatcttgggtcttatgcaagtgagtaccaagcacgnntcattttaggttactgttcgacgtatatctttatgcagacatttatgatacctggaacgatctttatgtcattgcttgctggagctcttttcggtgtggttagaggttttgttcttnntgtccttaatgcaactgctggagcatgttcttgcttcttcttatcgaaattggtcggtaggccattggttaactggttatggcctgaaaagttgaggtttttccaagctgagattgcgaaaagaagagataggctgctaaactacatgctgttctta

SEQ ID NO: 282 - DNA, 424 bp, Arabidopsis thaliana
gccttctgacttcgcttctgtcgcgtgcttcaatcgcagaagcttacatttactcaggagtgatgactatctgcaaggaaatggtggaggcaggcttgattgttgatatgggaactgcggttcactggtctaaatgtctgtgtaagattgaagcttcaggtggtgagctcactgagacgttgcagaagactttcccacctgattggagctcgcatcatcatcaccatggcttcttagatcaagtttctgatgttgactccgatgaagatgatgttgatggtgaagatggtgaggacgatgaagatgttaactctgtttcggatttattatcaccttacaagtaagaaaaaactgatattgtaacaacttaaggaaagagcaatatcagcatatttttgtaattttgttttcttgtgttttacgt

SEQ ID NO: 283 - DNA, 424 bp, Arabidopsis thaliana
gactgtccttggtgtaagagatcctatatctgcagcactctctattgtgaagggtggcctaacagctactgatgtctttgctgttgaatggattcataccggtattatacactttggaatgactgtttcctactatggttttgttagcgatgttttggagctctctgaaaaataccaaaaacggtttggtcctttgcgttactttgttgctggattcctcaagttcatgtgtttgccgaagtatagctatgaagtggaatatcttccggcacaaaaagaggatgcagaaggcaaaattcgacttgaaaaggaagctgtggatatgcaagatctctacacggatgtaatgaggagatcaagcagagaaggatttcctagagcctccagtttatcaagtattgactccataatgaccccaagcgta

SEQ ID NO: 284 - DNA, 424 bp, Arabidopsis thaliana
gtttcttcgttggtttgacttccaaggagtgaggaagaggtgtagagctttggtctctgaagtcaacacttttgtcggcggaataattgagaaacacaagatgaagaagggtaataatctcaatggagaggaaaatgacttcgttgatgtcttgcttggcttgcaaaaggatgaaaagttgtctgattctgacatgattgctgttctttgggaaatgatatttagagggacagatacagttgcgattctagtggaatgggtgcttgcaagaatggttttgcatcaagacatccaagataaactctacagagagatagcttctgctacaagtaacaatattagatccttgtctgattccgacatcccaaaactgccgtaccttcaagctattgtcaaagaaaccctaaggctccacccccctggt

SEQ ID NO: 285 - DNA, 424 bp, Arabidopsis thaliana
ccgggcaggtgataagaccacaaaaccattgttccaatttattttttacataatctctaaacacaaagttcttctcttgttcatgtaaagcatatgcagaagcagctgatatcagtgataaaccagcaagaaccagtcgaatctgaacatcagaaggaacaccagccgtggcggcccagaaaaccgtcgcgccaacgagaaacttcttgaggatttggaaactgttgtaagctcctttgcaggaagagcatacttgtgtatgctgatcaaatctatctagcatctgacgcttggttaagacagtggaagggagaggttggttagacggggtggagccgaaccattcaggctgactcttaccatgccgtctgagccagtttctgaatgctagaacaaaacggtctgcctgggttggagtgaatgt

SEQ ID NO: 286 - DNA, 424 bp, Arabidopsis thaliana
tttttttttagaaatttaatccactagtattaattgtgtcacatttgtttctcaaaaatagaaaaaaaaaaatcaaatctatgtgatttggagtttataaaaatcatgaaatcttttctttactaaatgttcttcttcactccttattcattaagcatccacaatttcccatcaatattgttttatactttatatacttcttcaagtcaatctcagtctcatttcgaacttcttcccaacaagtaacgacagtttagaaacctccacacttagaaacctcggatcatcattgtccgaaaccgtctttataagagagattctaggactcctcaatctctcacttgtcctaacctcgtacgttttcacgttctccacgttctcgaacccaacaaacgtcactttcccgatgctccatttcattttc

SEQ ID NO: 287 - DNA, 424 bp, Arabidopsis thaliana
tttttttgagaagggaaaacacagagtaacattttttttctgaagtaacaaataaaaatgccccaagacacaaagcaaaacgtcaaggggaaagataataaagagagggaggttgcttcactctaaagtttttaacccaactttgccttaagggaagcaacaggaagcttagaaagaaccttctcatcaaacaccatgtaatgtttcttcagctccttcaacgtcttctctgccactggatctaccttgtcctcatgtttctcatacaacattggtactgtatgtaacaccacaaaacagatgtatacaagagtcaagaagttgaaccagtttcccacaaccgagattatccacagcccacaaaccaccatgagaaatttcttcaagtcccttcctagggcaatgctccttagaataacaaagg

SEQ ID NO: 288 - DNA, 424 bp, Arabidopsis thaliana
ttccaactctcaccaaagccctaccgaatcaccaaccatcaccgacgtcttctccgcctccgcttacggcgatctccaccaacttaaacatttcgtcgaacataatggctcttccgtctcacttcccgacgataatggcttctacgctcttcaatgggcggcactcaacaattccctccacgttgctcaatatatcatccagcatggtggtgatgttaattcagctgataatatacaacagacaccattgcattgggcagctgttaaaggctccattgatgttgctgaccttttacttcaacatggagctcgtattgaagctgttgatgtcaatggcttcagggagttataagttttgcatcaggcttgttgctgctgtgatcataggcttcagattcttctgactataacgcactagatattg

SEQ ID NO: 289 - DNA, 424 bp, Arabidopsis thaliana
  misc_feature (1)...(424): n = A,T,C or G
tctagagcggccgccctttttttttttttttttttacagagaaagctacagaatttacttgaaatcaagaatgtgtgaagagtttatcgtttannnggaatctaccatagattataaacaatacgaatggtgccttccttctcctgtggctttcattgctgaaactactgtaccaaacaagtcctttgccctttttgtgtggaccagagacctctgataattcggttacgttccgcttaaccagttaaggcttccagcacgaaggtggtatgccttgcttctcaaaccattcaggcatgcggaaccgatcataaagtgtcggtcgtacatcgtcttcctctgacagttgcttcagaagcggtagaataacatccaagagctgagtatcatttggctgccctgcggaaaatgcaatacatggaat

SEQ ID NO: 290 - DNA, 424 bp, Arabidopsis thaliana
acgtcgcatgcacgcgtacgtaagcttggatcctctagagcggccgccctttttttttttttttacttatagaggagttgatattcaaaagtgcatgggttttttttgcatcttaaaacttcaccaatctatatatatacttgttgaagaacccacaagaaaagaccctttctaaaaggttatcttggacccgaggggtaatcgttttcgataagggaattggaataggggatgagccagtcagtgccagcatgaggataggcttgatagttaaaatcatgtattggcatctcctccttttgccattcttcccatctctcagctaaaccatctccttccagcattctcactacttctgacatctttggacgttccattgcagaactttgagtgcagagcagagccatttgtatcagctgctcca

SEQ ID NO: 291 - DNA, 424 bp, Arabidopsis thaliana
  misc_feature (1)...(424): n = A,T,C or G
tgcattcaccatcgctcttacgtttgaatctatccagatccaaagctcttcttcttcccggcaattctgagatctcattttcaccggcgacgagctttaatcggagaacgatgaagcagcttcacaagcaaatgagctcgaagcgtgatgaagaaaccattcccatgagccaatccagtccttactctcccaaaacnntaaagcatcccagatctctncccagatcgcttcactatctctttcgtgaacaacgactcctctttatcctcgtcgggatcttgatcggatccactttcttcatcctccagccttctctctctcgtttaggcgccgctgagtccacctcgttaatcaccagatctgtttcctacgccgtcaccgattccccgccttccaggtcgacttttaattccggaggcggcgg

SEQ ID NO: 292 - DNA, 424 bp, Arabidopsis thaliana
gctttgttcagtggcaaagatgatgaatcatttgcttttggctcttttccttgttggaaccatcgccttaccagatagaggaactcaacaattgaccaacgatggcctcaccggcgcgaggcgagagatactctctttcttagaccaaagacttgcagtggtgtacccagtgatccagagattcaagtcactcatcactctcgacccttataacgtgaccaagacatggattggttcagacatctgcagttatagaggcttccactgtgacaatcctcctcacaacaaaaccgcagttactgttgcttccatcgatttcaatggctttcagctctctgctccatccatcgaaggatttatcgatcaattcgctgacctagctctgtttcatgttaactcaaacaattttggaggtacggtgcct

SEQ ID NO: 293 - DNA, 424 bp, Arabidopsis thaliana
  misc_feature (1)...(424): n = A,T,C or G
tcgccgccaaatcccaaatctataaagctccagttttatccttctccactcctaaacgccgtcgtcctcgtcctcgccggaaccggaaatctaatggctcatcctacgaccacaccgacggcaatcttctttctatctccacttcctctccctccggagccgacgaccaaagtctcagcttaaccctagacgttcaccgtatttcaactctagctaattaccgcttccaattgtttctcgattccagcaaagacgcgttctccgacttgcaaacactaatctcactcgacgataaccggagagtcgtnnnctcgtgcaaaaaatcaactatgcaattcgtcggcggtgtggttatactaggattcgtatttggttttgcaattagggttcttgtgaaattaggatcagctttaaagggtaattt

SEQ ID NO: 294 - DNA, 424 bp, Arabidopsis thaliana
  misc_feature (1)...(424): n = A,T,C or G
gagagaaacaaaaaaagaagaagaagaagttgaagaagaagaagccatgaatgctttagcagcaacaaacagaaacttcaagttagctgctaggcttcttggtctggattctaagctcgagaaaagtcttctcatccccttccgagaaatcaaggtggaatgtaccataccgaaagacgatggtacactagcatcattcgttgggttcagagttcaacacgacaatgcaagaggtcccatgaaaggtggaatcagatatcatcctgaggttgatccggatgaagtgaacgcattggctcagctcatgacatggaaaacagcagtggctaagattccttacggaggagctaaaggagggattggttnnnatcctagcaagctcagtatctccgagctcgagcggttgactcgagttttcactcag

SEQ ID NO: 295 - DNA, 423 bp, Arabidopsis thaliana
  misc_feature (1)...(423): n = A,T,C or G
taaatctcgattatttcacttatatatataatcccatcttcaaatagatctgataaaccaattagataaagaatatgtaatttacataactctgtttcccctatagctagcaagatactataagacactagaaacttcttaaatctcaaaagagatcgtgtaggtcatgtgactcgatcggcgagtccgagacggagagactccaagatgcgttcgaacacaagcacgtggcaagggatgcgannnnctccttgttgctcgtatccatactcttgagccgactgcttcagcaacgctacgaaaacggggtggttgagcagctccgcattcaccacgaaccgctccatctcgtggcctacgtaaacaggcacgtgcccctcgggaacccaagatttgtgtttctccttcttggtgcggccacgc

SEQ ID NO: 296 - DNA, 423 bp, Arabidopsis thaliana
ttttttttttttttgtagaacaaagttttttgtaactacgagagaataagaatacatttgtttccaaaaagatttgatcttttctgtcttttggagcgatacatttaagtagacagatcttggaattgccatgggttgaattggatcgacttagggtcggtgttatcttcagagttatccgcagctgcacgatgttccgagtactttccattgaattggtaaacttccagatcaccccatggtgtagcagtgacttcttccgttacatcgaaccattttggagtaaaggcttggcctttctcttcgcgggttctcttttcagctctctgtctctcttccatgctgctcttctcatagcctgatttggacatgtcgcccatctcaagtgcgtatctatcaggtcgtaaccgtgaatcagagggc

SEQ ID NO: 297 - DNA, 423 bp, Arabidopsis thaliana
gaaaagaatctcctgtattaacaaacttttagtttaacttataagagaagagaagaagaaaaactaaacgaaaaaacaaaaactcttcttttgcgggaatcacacaatcttctatgacccgggcttggatatctcaaggtataccatttgagtatacccattgaacactgacttatccagacgacctaaaccgattcgttggaacaaccggtgcttgccatctgctacgattggtggagtcgctcgagcagggtcataccgcgactgatgggttaatgaaggtcctgcgaccggaggtagctcccaatagacgtcaagaattgattcaacgtagcgactgttttgaaaatgctgattgtatgagatcggcgtgttagtgtggttgaaatcatctctcatttctcctttaactccccaccatgt

SEQ ID NO: 298 - DNA, 423 bp, Arabidopsis thaliana
gttgtatgtgtgagaattgacgaatccgttgttgtatacttaggtgtacgttcaacggtttacggatccggcattgttggtgttgtaggattttgtgggatggttggatgtggtgtaggatgtgttggtggacaattgcgacgtggactctttgggtggttaggccagcgattaaggtcggggtgtgtttgtgtgcgctgtgtgtatgtgttaaaaggaaaagggaggttaaaaaatgggggtttctgtggttgcttcgggacagttgccattcccgtcaacaacctccacaaccaacgctgcgtcttcaccacaggcacaagactttacactgagaacatctcacgcaaccacatcacacgcaaccacatctcacgcaaccacatctcacgcaaccacatcacacgcaaccacatctcacgc

SEQ ID NO: 299 - DNA, 423 bp, Arabidopsis thaliana
  misc_feature (1)...(423): n = A,T,C or G
attcgagctcggtacctcgagcggccgcccgggcaggtgattccgaccgaaaacaagtaaaagagatgaacacgatagcgaagcgagttacggggttggtgactcgtccnnnnnaaccagcagttgcagcaagagcgagggataagagtgaaggtgttctccaatgatctagacaaggcactgacgattttgcagaagaagatgcaatcgagtggaatggagaggctgatcaaagggactcagactcatcacattaagaattcggagaagaaggttctcgctaggaagaatcttgaacgcagaatcaaatccattgactttgctcgaaaactccaatcaatcctcatcaagaaagtcagaggtttatgagagctgaggtgaagcaagagtgctgctatgttgatcagtacctcggccgcgacc

SEQ ID NO: 300 - DNA, 423 bp, Arabidopsis thaliana
ggtcgcggccgaggtacacgtctccgatctcttttttcttttgtagcatcctcttttacccttaacgggtcccaatcttttccgactatcgccggaatcttcaaacttgacgtcgttatcacatgaagcattttgagatccctcaacggcggcgagggatgaggaggaggagatgggttcgaaggtatcaagaacggagatggtgttattgaaacacactaagattttagccactagatcctctagaccggacccgggttgagagaggagttgctgaagctgagtggttaagtcatggccttcaacgagttggttcataactttaagcttttttgctttattagtatccatttgttagttttgaggaagtttttggtgagtggtatcttatttttctttccacctgcccgggcggccgctcga

SEQ ID NO: 301 - DNA, 423 bp, Arabidopsis thaliana
gttttaagctcttttctttttaagagataaataaaaactctctacgaggttttttttacccaaaagattctcaggtaaaggaagaagaaagaagcatcatcagatcccagagttacatttcgaaaacaagagatgagagatgcagacaaacatctttacatgtctgtgtaatgctgtttttaagacgacacagcgatatatatattgcggagacatgagatatgtgaaaacctgtaaagctaagatcaatgcattggatgcctcggtgatctcggacgaacaggcgtctttgaaggactcacccttataggtaaagaaccaagaacaactccactgcagttgagagcagctattgcgctttccgccattacgaactctacaaaagcaatacgagtcgagtgttgataatctccaagcagcctc

SEQ ID NO: 302 - DNA, 423 bp, Arabidopsis thaliana
aaagtaactttaaagactaattcacttataaaagtaacatagagatcttgatgccaatgtcctaaaagaataagcgtttcaatttcacttggaaatgtttaagacctacgaccgtgaacctaagaagagtcattcctcattgtgacaagctactttctaagagggtctcagactcagagagctgctttcttcacctcgaaaaaatttgagcgttctctgtttgctgcatcaatgtcttcttgtgatgccacggccactgcaacgcctttatcactaacagagtctattgcctctgcgaattccttgaagtccttcaaacttgtagataatatctcttcacgccttatttgcctctcttcgtcggttacattaagtaaatgcctcaacaaactggtataacctttggcatcagggagttggtat

SEQ ID NO: 303 - DNA, 423 bp, Arabidopsis thaliana
ccacgcgtccgaatttgtggaaatagtgggaaggagctgctaatgaagacggaagaactcctagcgtctgggatacaacctcccactgttataatggaagtaatggagatatagcatgtgatgggtatcacaaatacaaggaagatgttaagttgatggcagaaatgggcttagaatcattcagattctctatctcctggtcaagacttatacctaatggaagaggacgcattaacccaaaaggtttattgttttacaagaatctcatcaaagagctacgaagccatggaatcgaacctcacgttacactttaccactacgatcttcctcagtctcttgaagatgagtatggaggatggatcaaccacaaaatcatagaagactttacagcttttgcagatgtatgcttcagagagtttgggg

SEQ ID NO: 304 - DNA, 423 bp, Arabidopsis thaliana
ctttttttttttttttttttttttaagtataacgagcagcaccaagcgttttatgttaccagtaatacacatactatgcattgggggacaagccattcatagagtctatataagtatcctaacaattcaagtaaaaacaaaacaggtattgcattctaagaaagataacaagaggaaaaaaccaaagaagagaaggcggtttagcaggcagctgatgatccggtttactctcaatcatcctgtcaaacaaagtatgtttctttttactgactcacacgtgacacgattattccagtgatgacttacaattcaaactcgtcttcaagcttcagagcctcagcagcagcctcttcttcctcatcgtcaacaacaaagtaagggttatgcacctctggcctgaacttgtagccagtaaacagatag

SEQ ID NO: 305 - DNA, 423 bp, Arabidopsis thaliana
aagatgttcttgaagaggtttgtgatgagctaactaaaggaatcggagatgataagaaggagatggagaaagagagagagatgatgcatatagctgatgttttgagggaagagagagttcaaatgaagcttacggaggcgaagtttgagttcgaggataaatacgccgccgtggagcggctgaagaaggagctccggcgggttttggatggtgaagaaggaaaagggtcgtcggagattcgtaggattttggaggtgattgatggttctggttctgatgatgatgaggagagtgatcttaagtccattgagttgaacatggagagtggtagtaaatggggttatgttgatagcctgaaagatcgtcggagatttgatggctccggcggcgatgatgatgatgatgatccggtggagaagagat

SEQ ID NO: 306 - DNA, 423 bp, Arabidopsis thaliana
cctctagagcggccgccctttttttttttttttttttttcacacaaattttctttgtaaacgaagtctgagcctgaaaagttaataaacaaacccacaaatgttgagaacacacacacgcactaacatcaaccccaagtgtcatagattagatataaaattcagtgaccggcaccggccgatggatttgttagcaactcaagtgacttcttgagatgttctacagcagtcgagacttcatcaaaagccaaagctcccacagcgaatctagcagccttgagtgcctctgcaaccttctcaggccctggctggtagctgctatcgtaatggtacttctgagctgaactcggtgcaggatctagcacgggagcaatattgatacgcccgtttgatgagtaaggtggaggaggaggagcagaggaga

SEQ ID NO: 307 - DNA, 423 bp, Arabidopsis thaliana
cctctagagcggccgccctttttttttttttttttttaaacaatgccgttacaatcggatggtttcattcattctttagttttctgttattatttacttatattgttcaaataaaccaatttaccaagaaaccataaccaaataaccgaggtaaatcaaagttctgacctgatcggtttggtttacgagagtgaaccgagtttacttacttacttcctggagacataagcaaagtattgtgccatgggaactacaaaggcaattacaagtaatcctccaacgacaagactgaactgtcctcgcttctcatcggtttcttctttcgtcttgaaatttgattctctcttgctatcctttacggttggacccccgggatctggttgaccgtctatagctgcaaccaaccttttcgcactgctatat

SEQ ID NO: 308 - DNA, 423 bp, Arabidopsis thaliana
gtgttacctattctctatcacattatcaaaatcccaaaatggttcctcaaaaactctgatttgccatatccaattattcttcatgacctttcccaataaaagagagtaataattacagagagatctaatgtttatcctatatgagaaaaagtacctgtgtgtgtttcacagtttcatcatacatcatcatgctcagagtgttttggtgcggtcatatgtagataggtttaatatcatttggtccaaaacttgctgagcatgttggacacttcttttgtcgagttcctgtgagcttttgcacacatgggttgcagaacaaatggtagcacttcgtaatcaccacctcttttgggcgatcgttgcaggccttacacttcagaatttctttaaattcactgagttcttgtcggagcttttgaatgg

SEQ ID NO: 309 - DNA, 423 bp, Arabidopsis thaliana
agaatcattgttattgttcatgcattaaccttgttgttatgttcctccatggcctgttacatcgttccttattaccaccatcctgttttgtctcatcccaatagagaaatcttcagtcaccgtcaccaccaccaccaccgtttctgcaacaatctcttgaatagaagaattagtgttcctcgaagctccgctattagtgacggtggtgtctcctacaatactctagtctccgaggcggtgaggcttttggttccacaagcaaactttgattcttcaaagcttaaagttgagttcttaggagagttattggagaacaagagtaacggaggaattattacgccgcggacttatattctttcgcattgtgacttcactgctaacttaacgttaacaatctcaaacgttatcaatctggatcaacta

SEQ ID NO: 310 - DNA, 423 bp, Arabidopsis thaliana
tcaagtctctgtggagcaagaagctactcggttactgggaaacttgggatgggctctgatgcaacgagacaactttgtggaagctgaagatgcatacagaagagctttatcaatagcaccagacaacaacaaaatgtgtaaccttggtatctgccttatgaagcaaggaaggatcgatgaggccaaagagactttacgacgtgtgaaacccgcggttgttgatggccctagaggcgtggattcacatctaaaagcttacgagagagcgcaacagatgctgaatgatcttggatctgagatgatgagaagaggaggagatgataaggttgaacaaagaaggctctttgatgcaatctttggatcttcctctatatggcaacctcagccttgtagtgagcagactgtgaaggctaaaccaaagcc

SEQ ID NO: 311 - DNA, 423 bp, Arabidopsis thaliana
  misc_feature (1)...(423): n = A,T,C or G
gacgcattgtctccattcaatcgccggaaaattagaagagaagatggcggcgccggaagctccggttaagtacgtcggaatatgtaaggattccgccgctttcaagcttatgaaatcgatgggttgggaagaaggagaaggacttggtaaagataagcaaggtatcaaaggttatgtgagagttacgaacaaacaagatacatctggtgttggtcttgataagcctaatccatgggcatttgatacaactcagttcgataacattctcaagaaattgaaagtgcaagctgctcctaccaagactagcaagaatgatgatgatnnagataaggaagatgaaagtgaagatgatgctnnnaaatctgagcctgccaagttgaagaccgttgctaaagtcactcgtccacaaggaaggtataaacg

SEQ ID NO: 312 - DNA, 423 bp, Arabidopsis thaliana
tcttctagttgcttctttgcttctcctaactcttgcttgtctattactagacgaacgaatttgagctgtgttaacacttcggttaaatccttgcgccacagcagattcgactcgaagcataatctcgttaaacgtcgaatcaatggagattccgttgttcggagaagcaccacaagcaataatagcactgaggagacagaatcatcgtcgtcttcttcgtctgtagattgcgttggaatgggatcagacgtggaatgcgtcaataacggggaagatgaggagaatcggagctctggaatcttgagcggcggtgaaggaacgtttcttgaatggacggttctgatttcacccttctttttctggggaacggcgatggtggcgatgaaggaagtgttgcccattactggtcctttcttcgtggcc

SEQ ID NO: 313 - DNA, 422 bp, Arabidopsis thaliana
tttttttggcaagatttaggacatggatgatgaaatggttcgtacaaacagaatgtagctattgatagtaaataaactaaatattccaaaagagaaagcttagtctcatcattgctaaaattgagaacctcataacacaaactttacacatctgttatagaagcaagccagcaatgtgttatctttgggctcccatcattcctcaccatcttcctcctcttcatcgtcatcgtcttcttctccctcttcgtcaccatcatcatctccatcaaaatcctcttcatcagcatcattgttgaagtaggtgagagggttggaccagagatcttccttgataatatcagcaacctcatcatgaatctcatccccagcatcttccttatgttgagcatcagtaaaccaagtaaagaaactctcctctg

SEQ ID NO: 314 - DNA, 422 bp, Arabidopsis thaliana
  misc_feature (1)...(422): n = A,T,C or G
atttctcttctccgatcggtgaatgcagttacattgacctcggatctaaccaagctcttctggtttccagctctctggaattcaaaaaaatggaggagaaatccaagtcaagaggttggtgcggttggttcatcgccattattgtgctagcttctgttatcctcgccgtcgtttacactgttaaattgagaacgaagaaatccggtgacgatgacggtggcggtcccgttcctggacctcccggcgccattgataagaaatacgccgacgctcttaagctcgctttgcagttcttcgatatccagaaatctggtaaattggagaacaataagataccttggagaggagattcaggtcttaaagatggaantgaagataatctggatctttccaaaggcttatatgatgctggagatcatata

SEQ ID NO: 315 - DNA, 422 bp, Arabidopsis thaliana
atagaaaacaactacagagcttgcacaattccttacagatttccttctgatgatcccaagaaagccactccaaatgaaatctcgtggatcaacgtcttcgccaattccattccttctttcaagaaacgtgcagagagcgatatcactgttccagatgctcctgctagagctgaaaaatttgcagaaagatatgctgggattcttgaagacttgaagaaagatccagagagtcatggcggaccaccagatggcattcttctatgccgacttcgtgagcaagtactcagagagttaggatttagggacatattcaagaaagttaaggatgaggagaatgcaaaggctatatcactatttcctcaagttgtcagtctgagtgatgctattgaagatgacggaaaacggttagagaatttggtgag

SEQ ID NO: 316 - DNA, 422 bp, Arabidopsis thaliana
gatctcctttggaacaagtactgggtgaacactctttcttcttccccactgttgggcaatggagactatgttgccgggcaaatatcagacttggctgagaagctcgagcaagcggagagtcagctcgctaactcccggtatggaggaattgcgccagccggtcaccaaaggaggaaagaggatgagcctcaactcgcgaagataactcgggatagtgcaaagataactgtcgagcaggtccatggactaatgtcacaggttatcaaagacatcttgttcaattccgctcgtcagtccaagaagtctgctgacgactcatcagatccagagcccatgattacatcgtgaagttggtctattcttttgttttttggctgcggaaattgactatcggtttgacccggtttatgaggcaatgccca

SEQ ID NO: 317 - DNA, 422 bp, Arabidopsis thaliana
  misc_feature (1)...(422): n = A,T,C or G
ctttttttttttttttttttttttttttttttttttttttttttttttttttttttttttttttttttttttttttttttccaccgaaacatagttttattcaaacatatatacgtcgtattacacataacaaaaacgtaccnnnatgatgacaagagccccagcaattacacacatgaaaattcgtatacgacataacaagaaaaaacccttgtttggatttccacttcttggggttgttgaaagactctaccttgccntcattacccccaagcaaaagntatttacccttgcgagtaagttcggggcattcgaagcccaaaaccgggccgataactttctgggcgtaattagccacctctataggggtcttgccaccaccgttgacagtcatttcttcaggcaaacgatccaagaaaggg

SEQ ID NO: 318 - DNA, 422 bp, Arabidopsis thaliana
  misc_feature (1)...(422): n = A,T,C or G
taaataaattttatttatttattctgaaatcaaaggagatgagacttggcttggttttcgttacaaagacgcggaaacattaaaacggttcatatggttannaactctcgttggctttgtttcatccttgttcacaacctggagatggaatagtccaatgcatctaccaagaaatctgcatcatctttagtgaaacacattggtggctttatcctgaaaacgttcccatgaagtcctccttttccgacgagaatgccaagttctctaagttgctcaaacaagacagatgtttcagccttggctggtgtcttgtctttccggtcactcacaagctcaatcccaaccattaaccctcttcctctcacgtctccaatgatatcatgtcttttctgcacatctttcaaacgttgtataaggtgtga

SEQ ID NO: 319 - DNA, 422 bp, Arabidopsis thaliana
gaacaaagcagataggtttttcctttgtggtttaaaaacgaaggtttaaaataacacaaacgcagttatgtggaggaatccaaattcccagggagaaaacgaatagcaaagaaacaactccaattgtatgggagagacaaaagccaaagatcaaatgataaaaagcaatttaagagaggttcaaggaagcgagctgctcggttgcaccaccagcagcgacactcctgagaacatccatagcctctgcaactttggccttgagagcttctggtgactccaacagatggagcacttcagtctggtccatctccaaaagcatcccagtcactttggctgcagactctgcctcaacctgctccaccaacgggtacagcacctcacccagcatcgtcctctgttgctctggagtagcattagacaga

SEQ ID NO: 320 - DNA, 422 bp, Arabidopsis thaliana
agatttatgggattgggaatacagttgagggggatgatgattcagctgatgatgctaatgatcctggtaaagaatgtgttatatgtttgtctgaaccacgagacaccactgttcttccatgtcgacatatgtgtatgtgtagcggatgtgctaaggtattgaggtttcagacaaatcgatgccccatttgcaggcaacctgttgaaaggcttttggagataaaagttcacggtaacaacggaagcgggaataacaccggacagggagaaacagttgaacaagagtagctaaacacggccgagtatggattgaaatgccatcgaaatattagtagtatatgcatgtttgatccttgtatgttaacaacaaaatgtgtgattgtcaattcataatatagagattacgaaaaaaaaaaaaaaaag

SEQ ID NO: 321 - DNA, 422 bp, Arabidopsis thaliana
ccacgcgtccgattttatgctagaatggaatgcatcaggaatgttcctcatcttctcaatggtctccgccagttcgatcgtatttatatactttttggtacctgagacaaaaggccgatcacttgaagaaatacaagcactgctcaacaactctgtgcaataatatcatttttctttttctttttgggtaaatgatcatatatataagtcgattgttgttatttggtgtgagtttgaatgtgatccgtgtgcgtatcaaattttggatgggaaatttgaaacagtaaaaatttgtatattcctcgtttgggaaaaatgtatgttttggttagttatatgcaaaaatgttgttgaagaagtttatacataaaaagttaaatacaaaaagatggtaagaaaacaaaaaaaaaaaaaaaaaaaaa

SEQ ID NO: 322 - DNA, 422 bp, Arabidopsis thaliana
ttttttttttttttttttttttttttttttttttttttttttgattagtcataaaaagcctatctcggataaaagatcacaagtctctgataacttgaacaaaaaaaaaaaaaactcggtcccaaaatctttgaaatttgcaaagataaagaaggaagctttcatcaattcattctcctgacaagctcgttgatgaaattctccctgtttccagcatcaccaccttcgacgtagtggtttctcttcttcttaaggccaccgagtggtgccttcaattggaatggccacaggaagttgttggcttccttgaagtgaggtccaacagtcatgatctcgtggatgagatcctcaacgcagatgatcccatgctttccgagagcctgatccacaatggagttgtcagtaagtgctcggacgcgtgg

SEQ ID NO: 323 - DNA, 422 bp, Arabidopsis thaliana
ttttttttttttttttttttttttttttttttttttttttttttttttttttttttttttttttttttttttttttttttttttggttggtgttggttgtgtagtatcatcctcttcttgatcttgaacgacgtttccgtcaattcctgctggaaaaccaaacatattgaaagaatggcggctgctgtttcctctggatgatcctcctttgcttagagaccggcctagagacgattttctcagactagattgtttgaatgattcaattgatgacatcttttgctcctccgctgcattctcatcagatttcttctcttcttgtagacgaatcagctgagaataagctccttccgggtcctttagtagttccgtgtgagaacctttctcgacgatcttgccttggtggatcacagcgcggacgc

SEQ ID NO: 324 - DNA, 422 bp, Arabidopsis thaliana
  misc_feature (1)...(422): n = A,T,C or G
cgttacattaataaagatgatgtacacttttgagtttctactacatagaagatatcatctccacgtcgacaaagatttaaggaaannataaagagttactactaaaaagatagagaaaaatgtgttaaaacttaagagttactactaaagactaaaatccctaattactgcaatatgatcataataaggattgnnnacaaaactaaagagtacttaattatacaaattgtttataactaagcctcgtggttcctcaagcaaatcgtcaaactttaatgctttctagaacaacacttcctgaccctctagtgacatgttattgatgatcatatcgtggctttgctcatcaaagagccatttctcgaacaaagaaagagagccttgtgtaattagaccattaatgtcatggtctattagtttag

SEQ ID NO: 325 - DNA, 422 bp, Arabidopsis thaliana
  misc_feature (1)...(422): n = A,T,C or G
gagcggccgcccttttttttttttttttttttttttaagtagcaaagattttatatctnnnnnntggatatttcaataaaacctttcaaaatgattcttcatctgttgtttgttcatcctctaattgcaacgagccggagttcttgtgtttgttatacagtaacgcgtttataaactatacaaacttatgcatacagccccataaagatgtggaatgacaaaaagaagaaattatcttctgttttttgttctacacaaaaaatatacatagcaagtgagtttgtccatgttcatatgactgagaaacactgaatcggattttgtccacaaatctcacgctcttcttgtttctccctccttcttcttccccttttatttccaagggaacttgaatgtgtctttccaccatccttgtttagagc

SEQ ID NO: 326 - DNA, 422 bp, Arabidopsis thaliana
ccgccctttttttttttttttcttgcaatgttgttgtaccattggaaggctttttttcttgggtgacaaaaacttttaacttgaggtttaagttgtagattgggttaaagattatagatgctatcggaagcaacatgttaagatcttggaatgtcctaaccgcaaacacaagctgcactctcttgggagatttgagtcggtttttgctcgctagttctttcaaaatgcttagaaatggtgtgatcccaattcctcccgccacaagaaacagattatcatacctgagaaaatctaccgaggcaggtccataaggaccttccactcttacgattatgttgttaatcttattttcacaatttgccgcttcttctattttgttataaacagaatttgtccaatctccctcacatttcatcataata

SEQ ID NO: 327 - DNA, 422 bp, Arabidopsis thaliana
gcggccgcaaaagccttatttacatacatacaccaacaaaccaaagacttaaccattgatcaaacacatttatttatctcatgaaacaacaaaccccaacctaatcatatactacactaagaatcctctctaacaagcattcaatagcaacaagtgggtactacaaaattacccttacacaatagagtttacaactacattcactagagaaacttgtgtgaaaggtttaacactttttaccgcggcttatactatgatcgttgttttcgacttttcgcagtattctccggtgtattagccctaaagatgctgacttcaattcatggacattctccaactttctccgttagagcaaccttgagttgatcttgcgtgaaaaactgattccccattttcacagtcgcttgttggatcataagatc

SEQ ID NO: 328 - DNA, 422 bp, Arabidopsis thaliana
gcggccgcggtatggagaactttacagcggtttggcttaaaccaaagatgcttgagagttacctgagaagacaaggtcttgccggaactccttacacgcctcttgtcggtgatttgaagagaaattttagcatgctggctgaggcaagatccaaacccatcaacctaacagatgatatcacaccacgtatcgtgccttatccgttgcaaatgctcaagactcatgggaggactttctttacatggtttggacccataccaacaatcaccataatggatcctgagcaaatcaaagaagtgttcaacaaagtttatgatttccagaaggcacatacgtttcctctgggcagattaatagcggctggactcgttagttatgatggtgataaatggacaaaacaccgaagaatcatcaacccggct

SEQ ID NO: 329 - DNA, 422 bp, Arabidopsis thaliana
gagctatgacgtcgcatgcacgcgtacgtaagcttggatcctctagagcggccgcccttttttttttttttttttttttgcaagggaaacaaatttgactatttcaaatatcattaacatatttcataattggtatactttgttcatcacagaagaaatccattggatcaacatttgttttaactctcaccaatctatcgaaattgttcttgaaatacttcactccccaaacctttgcttcctcgtactttgtcttcatattcaacccaagatacattcccaaatcaatgtctctaaaattaacataagctcttcgtggagattttgaaacataaggagtcataaattcgtatacactctcgacccatctcaaatacttttcagtattagtcttgttcttatcttcttcttcactccaataa

SEQ ID NO: 330 - DNA, 422 bp, Arabidopsis thaliana
cctcactttaatcgcttgcttcgtcttctccgctttctatcaatacctcgagaatcgccgcatccaattcaaatccctttcttcctcccgtcgtgctcctccaccgcctcgctcttcctccggcgtctccgcgcctcttatccctaaatccggtaccagatccgccgctaaagctgcttcggttcttcttttcggcgtcaacgcagcgatcggttacttgctgatgcttgcagctatgtctttcaacggaggtgttttcatcgcgattgtcgtcggattaaccgccggatacgctgtttttagatctgatgacggcggtgctgataccgccacggatgatccatgtccatgtgcttgataatgattgataataaaatcaaaatcggaaaaatctcaaaaaaggtgtgtttgataattgatgt

SEQ ID NO: 331 - DNA, 422 bp, Arabidopsis thaliana
aatggatctccgtcggaggcctcctaaaccaccggttaccaacaacaacaactccaacggatctttccgttcttatcagcctcgcacttccgatgacgatcatcgtcgccgggctacaacaattgctcctccaccgaaagcatccgacgcgcttcctcttccgttatatctcacaaacgccgttttcttcacgctcttcttctccgtcgcgtattacctcctccaccggtggcgtgacaagatccgttacaatacgcctcttcacgtcgtcactatcacagaactcggcgccattattgctctcatcgcttcgtttatctatctcctagggttttttggtattgactttgttcagtcatttatctcacgtgcctctggtgatgcttgggatctcgccgatgcgatcgatgatgatgaccacc

SEQ ID NO: 332 - DNA, 422 bp, Arabidopsis thaliana
acgacggagcagtgagtaacggcatcatagtcgagcagacgtcaaacaaaggacctcttaacgccgttaagaaaccaccgtctaaagatcgacacagcaaagttgacggaagaggaagaaggattcgtatgccaatcatttgcgcagctcgagtttttcaattgaccagagagttaggtcacaagtccgatggtcaaaccatagagtggcttctccgtcaagctgagccttctatcatagccgccactggaactggcactactccggcgagtttctccactgcttctctctccacttcttctccgtttactctcgggaaacgtgtcgtcagagcggaggaaggagaatccggcggcggaggaggaggagggttaacagtgggacacacaatggggacttcgttaatgggtggtggtggttct

SEQ ID NO: 333 - DNA, 422 bp, Arabidopsis thaliana
taacatggagcttgtacccggttattctggttccaagagcctcagggttaagctagaatggagacagaaagaccttgaagattctgcattcccaaggtacaatgtgtatgcggagaatgtaaagtctactgatctaagaccgaggaaggttctagagaagccgagaagcgaaacagtgtttctcggagtcgctcacgtaccatcctattacatagcagaactggtggtagaatcagacgtgaaaggagtccgctttgtgttcaagcctgtgctaaagatggttcatggggcaagctggatttttatttattttacaccatcataatcgtctcatttgatttatttttgtttgttcggtaatctctttcataattgatttatgggtacttttctactgattcagctacgattcacttatcatg

SEQ ID NO: 334 - DNA, 422 bp, Arabidopsis thaliana
  misc_feature (1)...(422): n = A,T,C or G
acatctttaccttcttttgacccactccatttcccatctaacccgacccgttannntgacccggatcactacttcaacagaagagcttcttcttcctcttcttcttttgactataacgacgnttttgtctctcctcctccttccatggatcatcctcagaaccatctaaggattttatccgaagctcttggacccatcatgcgtcgtggctcgtcctttgggttcgatggtgagatcatgggaaaattgagtgcacaagaagtcatggatgctaaggctttagctgcttcaaagagtcatagtgaagctgagagaagaagacgagagagaatcaacactcatcttgctaagctgcgtagtatattaccaaacacaaccaaaacggacaaagcttctttgctagcggaagtgatccaacacat

SEQ ID NO: 335 - DNA, 421 bp, Arabidopsis thaliana
  misc_feature (1)...(421): n = A,T,C or G
atactagtatgtatagttatctcacatttcaaactagaaccagaattcaaacttcctcagtttagaatggttatctcctgaatcnaaccacattttgccgaacaaaatctgattcacatgtctgcaacggaccagagataagcctctatttccgttgctttcctctcattggtcttcttaatcagatccttctcagttccgttactacggtcgaccccatcccagtgtctacccggtttaatcccataccggtttgatgcagcttccaaccgtctcgtcaaccaactatgtttaggcacactttgtggtataatgaacccagattttttcatctcctcatcgtctcctagatccacaagagttgtctcgtactttcttttcttgaccaaatgagccattggatctccaaatctaactcttt

SEQ ID NO: 336 - DNA, 421 bp, Arabidopsis thaliana
ctagtacgtttttttgttttattgtaattctgtttttttttttttggtttgatacaacatacatgaaaaatatatttaaaatataagacgtttcagacattcgaattcaggacaaattgtttaataagttggacagaagaaacatcaccttgatttaaaaaaaaatactttgaagaaaagatgaacattaccatcatcatcatcagtaagtttatagacagagagatctctgtgtttcattgacttctcattctgctggtttctgctgccctaacttgggcgaagtaagcgtgcgccatggcttcttttgcagttaatctgtcttgatgatcataccgaagtagcttgtcgaggaaatcaatcgcctcgggtgaaactaagtgctgattgtctgcgttgatgaatttggaccaaggtttcc

SEQ ID NO: 337 - DNA, 421 bp, Arabidopsis thaliana
ttttttttttttttttgttttaaagattcttcaatcctaaaatccctcaccctatcatattcttctacctagacagaccataccagtgatgcaacaagaaaacagaccaaacaatacataaatagtttattctggaattagtgagccttatgagaatctgggttttgctgagttgttggctactcgcacggcggcttgttgcattttacaagtttacaaagtaagtgataaaaagggacgaaccttgacaatgttataagctgtcatttggtttcttgtcatttgagcaagactccaggtatgagatcacaaggtcagctgctttgcaacctgatgctattgatttcccaacagagagcccccctcgatgattacctgcatagaagaacccaggtagatcattctccatcttgtcaattgc

SEQ ID NO: 338 - DNA, 421 bp, Arabidopsis thaliana
  misc_feature (1)...(421): n = A,T,C or G
tcgagcggccgcccgggcaggtaaaataagtatatagtttgataagaaaagtaagaagaagaagaaagaagatgcagtcggcgaaggaaaagatcagtgacatggccagtacggccaaggagaaactcaacatcggtggcgcaaaggcacaaggtcatgcggagaagacgatggcaaggaccaaaaaagagaagaagttggcccaagagcgagagaagtctaaggaggcgcaggccaaagctgacctccatcaatccaaggctgagcatgctgcggacgctcaggttcacggccaccatcttcccggtcactccacntannctacccgagccaccggagctaattacccgccgggacagatctaaaactagctctatagctatattaagattagccgccttgtttaacaatatgatatgta

SEQ ID NO: 339 - DNA, 421 bp, Arabidopsis thaliana
ttatttgatcataaagatattattgcttcttcaagtaaacaaaaaatgggaagctttctcttcctcatcgtagtcatcttcctcttctcttcatccgttaacgcttgtgatcgatgtcttcaccgttctaaagcagcttatttctcctctgcctctgctctctcttctggagcttgtgcttatggctctatggctacgagtttcttcgccggacatatcgctgcagctatcccttctatctacaaagacggtgctggctgtggagcttgctttcaagtcagatgcaagaaccctaagctgtgtagcactaaaggaaccattgtgatgatcacagacttaaacaagagtaaccaaaccgatcttgtccttagtagcagagcttttagagctatggctaaacctattgttggtgctgacaaag

SEQ ID NO: 340 - DNA, 421 bp, Arabidopsis thaliana
ccaaaaaagtttgttcttttgttttctgggattatccaaagagaagaaacagaggaaatcaatctcttttttagtttcagaccctaaatcctaggttttgaagttttgtttctttagtaattttgtcaggttttgtgtctggtgttgggatttttcggagcttggtttcttgaaccagctccattttctaaaaattccttctttaaatccccattgttgtaagtcttaaagaaaaaagaagatgacttgttgtttctcttgtttgaatcctcgaaccaaggacataagagtcgacattgataacgctcgatgcaactctcgttaccaaaccgattcatcagttcatggaagtgatacaacaggaacagagtcgatttcgggtatcttagtaaatggtaaagtgaatagtccgatacctggt

SEQ ID NO: 341 - DNA, 421 bp, Arabidopsis thaliana
ctttttttttttttttttacatggaagaacagaattatatcattcaataccaaacatatgatttttttttaattgaattcacaaagggtagcagaaagaaaatagtttgttttttttttctcaacaattgagtttgttttctttctaccgaaaagaaatattcaataatgttaaggttttgaattgagtttgatcatataaggttgagaccatattgtaaaataataacagatgacttcatgcccctgtaagccgcaacgcctcagcgaataactccttgagagaagcgtttgaagccgcgatcctctgcgatgttatgtccaaatctttaccggatggatcaaagatgagtccaccagcttctttcacgataacaattcctgctgcaatgtcccatggaccaccgaaaccgagctcgtag

SEQ ID NO: 342 - DNA, 421 bp, Arabidopsis thaliana
cggaaaggctctcctccaagtggcgtttatatggaggtgacaaatacgagcagcatcatgtggttcttcagggacaaaggtttcgatgatccgagtatcgacaagatgttgagaaaatgcaaacagttggaaaaggctcaaagcgatgtggcatcagaaaactgggactacctgagtaacattgttggtatccaagagagaaaactcccttacatcgtctcccgatgccccaaaatcctgactttacgcctcgatgagagactcatccccatggtcgagtgcctctccagtcttggaaggaatcctcgtgaagttgcttccgccattaccaaatttcctccaatactctctcatagcgtggaggagaaactctgtccccttcttgctttctttcaagcgttgggtgtgcctgagactcaac

SEQ ID NO: 343 - DNA, 421 bp, Arabidopsis thaliana
ctttttttttttttttaaaacagaaaatttgataactcgaagaaataaagatacaagggagctcttacagttagtgaaaacataacaggaatctctggaaagcaaagattgcttccttaaaatgagttcctgagctcctcatccaaaggatcctgtcctagtaaatatttaacaatctgagtagttttcttcttcatcaaagaatccctaaatcatactttgtaattcttgtggcataatttcagaaagtagaaagttagatcgaagtaaaaagaagctaataaataaagcaagcatttagggatcagatctttcaaaaaaggggcctattcaactcttatcttctttttgctcaccatcatgggattttcaacctccatgatatcatcatcttcactctcgacgttctccggacgcgtgg

SEQ ID NO: 344 - DNA, 421 bp, Arabidopsis thaliana
aacagctgctctgtttgaagcttccttcaagccagtagaaaaactcgaaaacttgtctccagctacatctcccgtttggtctagcgtagaaaacgctctgttaactgcactatctacaacttcagaagcattctttgtaatggatgtcacagacgaggagaaggactccaaagtgttctttacagcattttctccttggttaagtgaagagctgaaggactccttgaccccagaagaaaagtcatcaacgctagctttcgcatcaggaagtgaagagctgaaggactgcttgagcccagaagaaaagtcatcaaagctagctttcgcatcaggaagtgagactgaactatccggagatattttaacagtcgcattggttcccgattcaacagagtctatacctgcccgggcggccgctcga

SEQ ID NO: 345 - DNA, 421 bp, Arabidopsis thaliana
ttttttttttttttttttttttttttaagaaacacgatatccgtttaaaacagaaagatcgggtcattcattacaacagaacctcaaacagagtttaaagtcttaaagacactggaaactgtaatgaaatatctaaaatgtttgcccaacagagtaagataatgatcgttgtttgcagatcacatggccattggttcaggaccagcagcgttcagaatgtctaagagtgagttttggggctccaattcttcgtgccaaagctgcaacttatctccagggtaaaagtttctcgtcactccctctgagttgattatgacagtccgtacgacaccaccactggctccatcacgggcgatggctagtgaaaccgccttcacaacaagttgctctgcttcttctttggtcatgttatctttccaag

SEQ ID NO: 346 - DNA, 421 bp, Arabidopsis thaliana
tgagctaatcgcgctctctgcaacatatactgcaggctcaatggagtaaacattagtctgaccagcagtatctttctcaacatagccagtccaaccacgcggcttccgaggaggaaatgttcccaccactttggtcttctctccagctaaccattccatactcactgttcctacctccttctcgggagcacattcttcggcattacaatcagcatcatcggaagaagctctaacgacggagaagaaaagtttccgtccgccggactttgaattgaggaatctgccaagaggtttaggcgatgcaaatacgtagccgtttggggatagcaagacattcgacatggttgatcaaataagaggagattcttgggattgttctatcttcttagagaaacagagacctgcccgggcggccgctcga

SEQ ID NO: 347 - DNA, 421 bp, Arabidopsis thaliana
tcgagcggccgcccgggcaggtacttcttcttgacagagtcgagataaagaacgtctgaaaacccccgactcttggctctgctcagtgctttcagaactggcgcataatttgtgatgctcttgacgcctccagctccaccaggagcagctcggacatattcttcctcaacatagaggttaagagcagccatcccttccttgaagtagttaccaactggagatgcatagacaatgaatgtatattcaggtgcaggacctaaaccaagaattggaccacttcccatcaacaaaggcctaatgtacaaagtccctttccccaacgcttgtttgcaagagcggtttgtttaattgcattaacaaactgatcaaccgaaggagaaggcatgagcatccgttcagcgccaagcttcatccggacagc

SEQ ID NO: 348 - DNA, 421 bp, Arabidopsis thaliana
cttttttttttttttttttttaagaataaagtagttacgaaatcgaattccactacaaaaattaaaaaagaattcgatgacaaaagaactctctctctttgttcgttacagcaaaacaagaagattctcattctctgtttttgattatacaaaaaaaaaaaaaaacatgtttgaaaatccatgtcaagctcgagatctctccccctttccacgttttgagtatcggagtttatcttcactcacatcactaaccaccaccggtggtgatcgcgcgtaccttgacggcttcctcttgaaatgcctatcttcatcactagattcataatctgctacttctatttccttccgactactgtgtcggtgaactgatgttcccacggcggctgcggcagaggcggaagcagatggatcggacgcgtgg

SEQ ID NO: 349 - DNA, 421 bp, Arabidopsis thaliana
tcgagcggccgcccgggcaggtcgcatctcattgcttcatcattaccaaatcatcaacttaatcgtttctctcaaatttagggttttctcttttctcgaaagtcttgcggttttctgaatcatctctatctggtttgagggtttcgtttgatatctggagaaaggggtttctggaaacaaggagttcataattcgcgatcttgatctatcgatcttcatttatatataaaagcgtgaatgagattatgatggagtcgaaaggtggtaaaaagaagtccagcagtagtagttccttattttacgaagctcccctcggttacagcattgaagacgttcgtccaaacggtggaatcaagaaattcaaatcttctgtctactcaaactgctccaagaggccatcctgagtacctcggccgcgacc

SEQ ID NO: 350 - DNA, 421 bp, Arabidopsis thaliana
gagaattaagatcttccttttcaccacaaaagtaacaaagagtggttggccatttttttatgtacactgacttctacaatctttgttgcattgtttattcaagaaccctaactcctacacaggtaaactgtaaggagagatgagcttatcggttttggtgtgagcagaggcagtctactcggcgaaagagtgttcattcaattgctcggttggaagcggctcaaccttctcggccttcccgtctttctttgggattatcagaccgtaacctccttcttttctcttgtacactatgtttatctcaccagtttcttcattttggaagccatagaagtcgtgactgactagttccagctgctcgactgcctcagcgacagtcaatggtggcatctcgaaagtcttggtacggacaatctccttg

SEQ ID NO: 351 - DNA, 421 bp, Arabidopsis thaliana
  misc_feature (1)...(421): n = A,T,C or G
gcggccgcttacaacagacttcaaaccccccaaaaaaagaccctaacaaaagtctcagattatcacaagtttaatttcttctctccataaagatgaaatttnnnttttctctgcaagactgcaaactcaaacttctcagcttatttagtatttgctcctcttaatagttctatctcttttgaccgttcggtcgtcaccgtgaagcctcatatacatggtactgaggatctttccaccagtcgcttctccatgtttgcaccgttatacccaaatgttcagaagacttttaagtttggtgaaagcaaagtatgttctttgttggaaatggaaagttgagagatcttcaatggcagagtgcttccccgtatgctacccattgtttgaagctatctgggaaatcatcgcgaatctttgtgtgtac

SEQ ID NO: 352 - DNA, 421 bp, Arabidopsis thaliana
  misc_feature (1)...(421): n = A,T,C or G
cacgaccaagaaatctctccggttacctccgggaccaaaaggtcttcctattataggaaaccttcaccagatggagaaattcaacccccaacacttccttttccgtctctccaagctatacggcccgattttcacgatgaaaatcggtggccgtcgcctcgcggtgatctcctcggccgagctagccaaggagctactcaaaactcaagacctcaacttcaccgctcgtcctctcttgaaagggcaacaaaccatgtcgtatcaaggccgtgagcttggtttcggacagtacaccgcgtactaccgtgagatgaggaagatgtgtatggtgaacctcttcagcccgaaccgtgtcgcangtttcagaccggttagagaagaagagtgtcaacggatgatggacaagatctataaagccgct

SEQ ID NO: 353 - DNA, 421 bp, Arabidopsis thaliana
caagaaactaaccgaatccgctctgaaaaaatcaccggtgaatctgaagaagacccttttcacgctagtcgcgagtatcgtgtgtaggctcgcgttcggggtgaatatccacaagtgcgagttcgtagacgaggacaacgttgctgatctagttaacaagtttgagatgctagtcgctggtgttgccttcactgatttcttccctggagtgggttggcttgtagaccgaatctcaggtcagaacaagacactaaacaatgttttctcagaacttgacactttcttccaaaacgtgctcgatgatcatattaagcctggaagacaagtatctgagaaccctgacgtcgtagatgtgatgcttgatctaatgaagaagcaagagaaagatggagaatctttcaaactcacaacagatcatctc

SEQ ID NO: 354 - DNA, 421 bp, Arabidopsis thaliana
aagctgaagaagaagttgaagaactgaacggatacgaaggtgacgatggagaagaagatgacgatggagaagacgatgacaccgagtcgaaatctcaaacgcgcgaaagcggatccagtgtagacagaatcaaggcggaatcgctattccgtcggatgcgagctgctcctgtgccggtgcgtgttcacgacgtgattatcagtggaaacgagaagactaaggaccatatcattgaagcggaagtggatgctgtgagagaggcgaccacgttgcaagagcttctcgaagcatctagggttgccaattcgaatctccgtgcgttagatatctttgattccgtcaacattacgcttgattctggtcctcctgagcttcctggtactaccaatgtggtaatcgaagtcgtcgagagcaaaaaccc

SEQ ID NO: 355 - DNA, 421 bp, Arabidopsis thaliana
  misc_feature (1)...(421): n = A,T,C or G
tgtgtcacgcttttctctagcgaatactttgatgcttcttcatgactctttaacaagattattctgagcttttcctctggccttctaattattaaagtcttcctttttatctattgttaaggtttggcttcgttgtctcttcctcttacctctgctttttggttcagagtatttgaattttggggaatattaaaaattgcctgatactgaaatcaatctcttgctgtctagtgatggctactgaagagaagcctcttaattctcttgatttaagccatgatgattcttcnnctgcttcaaatcaggctgaaggatcatctgctataactgaagacacttctgcgaatgttcaacaatggaggcgaaagaatctctctttacagataccctctagagcagctggtctctctcctgaagattc

SEQ ID NO: 356 - DNA, 421 bp, Arabidopsis thaliana
tttcctttgcctaattcccctaagtcatcgtctcttgaacggttcctgccattaatgtcgaactcttcctaaaccctttttgttcacatttccttctctttctcttcctccgtctctctctgaaaaaccctaattgactcgttgcgattgaaatggatccttgtccattcatccgtcttacaatcgggaacctagctttgaaagttccgttagcggcgaagacaacgagctccgtcgtgcatccgtcgtcttctccttgtttttgtaaaatcaaactcaaaaacttcccgccgcaaaccgccgcaatcccgtacattcctttggagacgactcagtttccggagatccaaaccctagccgccacgtttcatctcagcagctccgatattcaacgcttagcttccagatctatatttacttc

SEQ ID NO: 357 - DNA, 421 bp, Arabidopsis thaliana
  misc_feature (1)...(421): n = A,T,C or G
agaaggatagtgttggttccacttccattactaggacatttcactccgatgatgcaactcggccaagcccttatcttgaagggattctcaattatagttcctcagggagaattcaatcgagtaaactcttcgcagaagttccctggttttcaatttatcaccataccagattctgaactcgaggcaaatggaccagtcgggtctctaacacagctcaacaaaattatggaggcaagcttcaaggactgtataaggcagttgttgaaacaacaaggcaatgatattgcatgtatcatctacgacgagttcatgtatttttgtggagccgtagctgngnagttgaagcttcccaatttcatcttnnntactcaaactgctacacataaagtttgctgcaatgttttaagcaaacttaatgcca

SEQ ID NO: 358 - DNA, 420 bp, Arabidopsis thaliana
ttttttttttttagattatcatgatttcatttcatcatttcggttatttgacttgcagtttggaatcgattttgtttcatttcaaggacaaaaacatatacaaatactgatacaggagaaaagtatctctctacaagtcagtgaacaaaaagaatataataggacacaatcatcgcctcctgatttctcaaaaagctgaattggccacgtctaaggaggagacatcatctcttctcagaagctgatacttagttaatcagagagaagtaaatctccctctccttcattccataaggcggcattttgctctggaaaagcatctcgagatcgcttttctagggtccagcttgaaatggaaagccaccattcatctgtcgcctcacatgctctggtattagcctgttgataagctccggtgaa

SEQ ID NO: 359 - DNA, 420 bp, Arabidopsis thaliana
tcgagcggccgcccgggcaggtgggtatattcgtcattgaaacaaacatgagtcgataaaattgacagagtcacagattctattttttcctctctctctgctctttgttgatctgtctgtgtgggattcttcctttagttcctctgttgatctatccaatcgaatcttacgaaaattttcgagtgaagatgaggtcgcttcaagcaccggttgtttgccctagtgttcgtcccagacaattgggtgtctctgctttacttgtcaactgctctgtttcgaaaactaggagtctcagaaaacaattctggggtaaccagaccaaaaatgacaagtctcaggctgctacagtgaatcttcgtctgcatcttcggaggtataagagtatcaaatgtcttttcagctcgcactctgatggtacct

SEQ ID NO: 360 - DNA, 420 bp, Arabidopsis thaliana
  misc_feature (1)...(420): n = A,T,C or G
aatatgtgtgcgatcgggaagatttcgatgtcgatggaggatttgtcaccaccgtctgcggcggtgaagattgaaaggatcggtggaaggaaacgcggtggatctgttgtgtcgagggagaagctagatgtgtggttgagagattcggtggttgagatcgtgaagaatcttagagagtcnncgttattgatgcatttatacgcggaggctaatggtggtttgacgacgacggcaacgaatccaaaggcggaggattggacagagatggaaggaaagtggggtagaggagaagagaggacgccggaaggagttatattggtggagaagctcgcagacggtgacatagcagatgatgatgatcacgatggtggcgcgtgtggggaagatacaagcgcgtgggggattgtggcgcaaggaaga

SEQ ID NO: 361 - DNA, 420 bp, Arabidopsis thaliana
ccacgcgtccgcaagaaatactcctgcgatattcttcggctctggtgcagggagcaacaaatgtgttctggatagacatccagacaaatacgaggcgcttccaaagtctctttcggtatctcctggaggaagttgctttggagcagatacgattgaaaaaaattcccattcaggctcagagggaactgtatctcttactctctaggttcattttcttttacaattcagtggataaactcgatagcttcttgaggaacttcccagagtttccaaatgctttcttgattggaggacctggagatttccttgttatcgaactaactgatcagctgcaaaaactgaaggtggaaccagtgctgctacattatctttctcagatgaagattcttcaaggtatggaactgagaatgactactagca

SEQ ID NO: 362 - DNA, 420 bp, Arabidopsis thaliana
  misc_feature (1)...(420): n = A,T,C or G
aatcctcacagcagatcacgtgctaatcacatggctccggggcttactcaaaccgctgatgctatgtccaccgtgacgataacaaaaccgtcactgccatcagtccaagacagcgatcgagcttacgtgacgtttcttgctggaaacgnnnattacgtgaaaggagtcgttggtttagccaaagggttaaggaaagtcaaatcggcttatccactcgtagtagcgatgttacccgacgtcccggaggaacaccgtcgtatacttgtggatcaaggatgcatcgtccgtgaaatcgaacccgtttacccacccgagaaccaaactcagttcgccatggcttattacgtcatcaactactctaaactccgtatctggaagtttgtggagtatagtaaaatgatatatttagatggagacatt

SEQ ID NO: 363 - DNA, 420 bp, Arabidopsis thaliana
cttttttttttttttttttttttatgtcattgtctttttcatttgggtataaacgtccatggaaataacattcggtttcgcgttaacaacaaactctgaatgtgatgtttactttgcagcaacaaacttgaaaatatgaacaaaggtcccaaagaaatgaacaaaatgagcagctttcattccatcaaatacttcatcccataagtgctttcatcttttcattggcaaccacgagttccgctgatattcctggctcatttgccgagtgcccagcatcataaacaatcttgagttctgcctctggccatgctttgtgcagatcccaagcagacatcataggacagcatacgtcataccttccctgaacaatggtggtcttgatatgtcgtattttatcaacattgtctagcaagtgtgagt

SEQ ID NO: 364 - DNA, 420 bp, Arabidopsis thaliana
tttttttttttccgaaacaaaatcagatttgagtaataaacatatgatacacactcatgcaaacaaagccaaaagaaattgaaaactcaatgagaaacgaaagcattatattgcacataattataaagatggatttgtattaataagcatggttaaccctccgacagatgcgcctgatctctcccttggcgcctgtcaacggagagatatttcccatctttaccatcgatatagcaaactgctcaaagaaggcctcttgattctcagcgtatagctccaccagctccttggactgtttgttcttcgtgaacagaatctcatcagagctcaatagacctttgtacattatcaggttcttgaagtagtggttgtcaaacttgaacggtgtcgcgaagtcgaggaagaatagggtctggtcac

SEQ ID NO: 365 - DNA, 420 bp, Arabidopsis thaliana
tttttttgcttaaaggaaatatatatgcagacacaacaaccaaaaacacaagctggaccgaccattgacggtctgctactgactacaacaagtttttccgcaaaaaagaagaaaaatattgttaaccagtttggtgtatctgattatcaaatcaagaaaaaggtaaattcactgggaagacacaaaatatcaaaagctgaaaactcaaaaacctcttctgaaaatttgccactaagtggtttctagattgtggagaccttggggacttcaactgggaactcatgaatttcatccatccatgggttcttctctttcttagggtttaccgaccttaccgctctccaaaccgagctgttgcacttgaaccccgaaccaaaagctatctgccaaattctatcacctttcttgatccttcctttg

SEQ ID NO: 366 - DNA, 420 bp, Arabidopsis thaliana
ttttttttttttttttgacaatacaaccgctaatgactcattaaaagaaatctctaactaaattctacaaaattcattttgaaaaaaattgctacaatacatggaatgaagatttcctgctctaatcgacgcttcattcactcttcttctccgacataagaggtagaaggcaacctgaatttaatttcaaagtatctcttcttctctctcaagttacataatgttacactcactcttcttcttcttcttcttcttcttcggaagattcttttgatttctcgatttctgtcacctcgttttctgaggttgctgtgtcgtctatcttctcatcatcatctcgtagtgtctggcttgacgcttgaggatctgatgtccgagtatggcttgttggttctggagcactcgagtccgacacttgag

SEQ ID NO: 367 - DNA, 420 bp, Arabidopsis thaliana
  misc_feature (1)...(420): n = A,T,C or G
tttttttttttttttttttttgaaaccaaaagaggtcaattatcaaaatgattgtttatatatggtcagcaaancngtaccgacacatcatgggaacattaggaaaactaaacctcaagctcatgaggttattaaangttcattttataacaaaacttctttattcgaaacaaagctctcactgattaaaccagctgagaaaagaccggtttaagagaggcatgagtaagcaaggtccttctcttccttcaactcctctgctgtcaaatccatcttcttcctcgatgcgtcatcaatcggtaaaccttgaacaatggtccactctccattacggcaggttacggggaaggagtagataagtccagctggaacattgtaggatccatctgagtatactcccattgaaacaaatgtgccctc

SEQ ID NO: 368 - DNA, 420 bp, Arabidopsis thaliana
tctagagcggccgcccttttttttttttttttgcacgcaaagatcaaaccccttatgacatctgagcttatgaggcaaacgtacacgagtattgtctagggttttcagaaaaaaagaggaaaactcatattccgagtccacagcttctgggctacatgcagactcgtctttgtttgacaaaacacatccgtttgacgctactagacaacatgtacattcgaagttgtgaatcttccgattaagcttaggaatcacgataaattgattctaccgattaagcttaggaatcacgataaattgattgagccatccacttcagatgcagctgaagcttgcccgttttggattcgtctaatgggtaccagtctttgtactcctcttccattataacccttgtcaacgtgaggatacatctcccaa

SEQ ID NO: 369 - DNA, 420 bp, Arabidopsis thaliana
gcggccgcaaaagttatcctttattgaacttagaaattagaaaacagagtagaaagagttctctatacaagccatttaacttaccagactctaaacaatgagtttacactttattcgtcaagccagtctaggctgaagcatttctcagcagcttcgatctttaaccctggaacagccttctcaacttcttcccacataaatgcaacgtcggtatcgcagattacatggcgcagagacttcagtgaaacagcagagctcggtctatccgagaagcaacattctctcatgtcgatcttctcaagcttctttagctttcctatttcctctggaagacaactcaggctgacacattgtgagatgtcgagatacttaagcccaggaagctcacatatttctccaggtaatgtctttagctcaggg

SEQ ID NO: 370 - DNA, 420 bp, Arabidopsis thaliana
gcggccgccatcaaaggcctatgttcatttgtatccactggactcaatttttccccaatgaagctacaaggtatgcacataatcatatcttacatttccaaatacagaagaaacgttcaggggcagtcttcaaaggaaccgtgtcggcattaactcgttgattctaaggggcatactatagaactcatcgttcctgccgtctccgttcctgtgctggaagggcttccaccacgggattcctcttgcgtcgtcacttgcatgtcttgcttccaacgtgttatctagtatggtcgcaagaatggtcgccaccaacggagccgaagcaaatatcgtattaagtatatcgttgaaccatcctcctgctgtcctaactggtccatatcctgctcttgaagtgttggcaagaaagtactgagcgat

SEQ ID NO: 371 - DNA, 420 bp, Arabidopsis thaliana
gcggccgccttcaaggccgacattatctgggattcagatgaaagtggagaagggtatgcgtgtggctgtctgtggcacagttggctctggaaaatcaagttttatctcttgcatcctaggggaaatcccaaaaatctctggcgaagttagaatatgtggtactactggttatgtgtctcaatcggcttggattcagtctggtaacattgaagaaaacattctatttggcagtccaatggagaaaacaaagtacaagaatgtgatacaagcatgttccctaaagaaagatatagagcttttctcacatggggaccaaactattatcggggagagaggtataaatctcagcggaggtcagaaacagcgtgtacaacttgcaagggcattatatcaagatgctgacatttatttactagacga

SEQ ID NO: 372 - DNA, 420 bp, Arabidopsis thaliana
cctttttttttttttttttgacaaagaaagaaggactcaagaattgtcaacaccaaagtttacaatggaaggatcaacaatcttcagagaaagccaatcagcaccagttttacaacgagtacctttacgtttctgcatattgttaaggatgggacaggaggaaacttgtcccactggaactgacccttgccgttttgatttgctttgtcttgatagcttcaaagctatgttccgtcgattcctctgtgtatgacccacacaaaaccctgaagcagcggttcgagaagtggcttaaaacccacagcaaattatatggaggaagggatgagtggatgctacggtttgggatatatcagtctaacgtccagttgattgactacatcaactccctccacttgccctttaagctaacggataata

SEQ ID NO: 373 - DNA, 420 bp, Arabidopsis thaliana
  misc_feature (1)...(420): n = A,T,C or G
agctttgataatttgatctcaatcgatcgattctattgagaatttgtgtacctgttttcttataaggttaactaaggattgtggaatcagaagtgttgtgtttttgtgatcggagattatggattggggaaacgtaacggttgatgatctcttcgatgctctccgagaagttgactggtcgtctccgccgcgtcctccgtctgagttcttctcaaggttcaccgttcctaaatctgtccctaaatgggatagtcgcctcaagtgcaatctctactactaccgaacaaactatttcatcatgatcgtcgttatacttggattgggagtccttacaaggcctttannnnnnttcgctgcgcttttgacagcattaagtttggcatttctaaatgacagctttgcaggttcttttagtgagaa

SEQ ID NO: 374 - DNA, 420 bp, Arabidopsis thaliana
accggaacatagtggacttgaagggagcctacgaggacagacactctgtgaatctgataatggagttgtgtgaaggaggggaattgttcgataggatcatttctaaaggtctttactcagagagagctgctgcggatttgtgtaggcagatggtgatggttgtgcatagttgtcattctatgggtgtaatgcaccgagacttgaagcccgaaaactttctctttcttagtaaagatgagaactcaccattgaaagctacagactttggtctctctgtcttcttcaagccaggtgataagtttaaggatcttgttggaagtgcatactatgttgccccagaagttctaaaacggaactatggaccagaggctgatatctggagtgctggtgtgattctatacatccttctcagtggtgttc

SEQ ID NO: 375 - DNA, 420 bp, Arabidopsis thaliana
cgaggtactcagaacacgtggatgcttacagagccgcctgtggacaccacccagacctcaaatcctttgattctaagattcagcagcgaacctccaatctgatagactcgctcaccgttgaagccaagactgggtcggtgtccccacacgcggtacacaaggaggtcattgagcacctagttgaagtaagcaaatcggtagcagacgtcattactgaatgcggagaagaagtgtgggagaacggaactctacaatctctggtcaaggactattttaacagtaccatggagactttgaagattttcgagactgtaacgcaatgcgtccatgaagcaaaaaggggccaacgttacattaaagcggccgtggcacagtttaaaaaagactcggaagaaaaggacgttggtgttaaaaagaaga

SEQ ID NO: 376 - DNA, 420 bp, Arabidopsis thaliana
cataataactcaagtgatttctccaaagatttaaaagacgaaattgccctcttctgcagcagaagataatgctccatcttccatttcacggagggcagttgcagttgaatcatctattcccagcagatattgtagcctcaaaactttttccggtgcgggtttgggatcactctttgaataaatagcatatagatcagataattcctctgagacctcccatgacattggctcagccggcacagctttgtcacatgcaagcaaatcattcagcgacaagaccactcctttagagtttctctgcctgagtaatgccacggcttggaccagcgaattcgataatctactctgagcgagatcatggacaactcttttggctttttccacatcaatactgagatcggatgggattgtctggtagac

SEQ ID NO: 377 - DNA, 420 bp, Arabidopsis thaliana
gaagcttgatactagtgggttcgagacttccatgcctatgattggatttggctcgagcagtgatatgcttgatgagctttcttctgtaccctcgtttgatctaccccgtactaaagagtttgatggatttcagaaaaaagctaaagacatgttgaagcatgcaaaaggaacaaccactctcgcttttatcttcaaaggtggtgttatggtcgctgctgattctcgggctagcatgggaggatatatctcctcacaatctgtgaagaagattattgaaatcaatccttatatgctcggtacaatggctggaggagctgctgattgccaattctggcacagaaatcttggaattaagtgccgtctacatgagctggcaaacaagaggagaatctctgtttccggagcttcgaaacttcttgc

SEQ ID NO: 378 - DNA, 419 bp, Arabidopsis thaliana
tttttgctgaagatttctttctattgaagaaagaacaaaggaaatctgccaaactttattcagatttcattactaaagaatcttgcagaaattacaataatcaattgcaatcatcaggaaatgaacaacaatcccaatagtgtaataattaatcaagaaaactattggaaatttaatctatttttatttatttctaactactagcgttcattcaagaaggcttggacttgacttagctagaggtagcgtttgagagcaacagcttagctcccttgacaagctcttccttgatcatgaacagaaccgcagcagctaaaacgctctgcacaatctttgtgctcatccctttgtaaaacccgtaaagcccttcatatcgaatcattttcagaatcgcgtccaatgttcctttgtattgttgt

SEQ ID NO: 379 - DNA, 419 bp, Arabidopsis thaliana
  misc_feature (1)...(419): n = A,T,C or G
acctaggtgtatttggagaaccgaggtaagaacaaacactttgaggaacaaagtnntgcgaacatgaaccgtgttgagaactatcagtctgtaacacggaagaaatgtaggtgtcggtttccagtacaccgagctcttggtttggttcagaaacagttgatgaagagacgtatctgtgtgcagggtcaatggaacatcatgaacggacaccaaccaaccatgcacaaatcccttgtaaccacacggtttcagcagcaacaagctggttatgtaggnnnagagattgtgtagacagacaaacaagacttgactcatcctcttccgtagacttccatgcatccggtcaaacatgagcgtcgtgaaaatctgaatcagaacatcatctgcaagcgccccgatatgttgggtgagaagagtgg

SEQ ID NO: 380 - DNA, 419 bp, Arabidopsis thaliana
tcgagcggccgcccgggcaggtgtcgcttagctccgattggttcgtcgtcaccatcactcgtcttcaacgatttgcttctttttttttctctctatttagtcccattttcctcaatttctaaaccccttatttcgaaatcattgttttgctctttcttttgattcgaattcgacagaacagctcttttaagttattcataaaccttgtgtttgagttttggtccatcgagtatatgggtcgtggctcagtaacatcgctcgctcctgggtttcgttttcatcccacagacgaagaactcgttcgttactatctgaaacgaaagatctgcaataaaccttttaagttcgatgctatctctgttaccgatgtatacaaatctgagccttgggatctcccagacaagtcgaggctgaaaagt

SEQ ID NO: 381 - DNA, 419 bp, Arabidopsis thaliana
atggaagttgtccgatcctatctaggaggaagaaaagtgcaattatgtggattggctcaatacgggaatctgattggaataacaatcggctacacaatcacagcttcaattagcatggtggcagtgaagaggtcgaattgtttccacaaaaatgggcataatgttaaatgtgccacttcaaacactcccttcatgatcatatttgcaatcatccaaattattcttagccaaatcccaaatttccataacctctcttggctctccattcttgcggccgtaatgtccttttgttatgcctccatcggtgttggtctctccatcgccaaagcggcgggtggcggtgagcacgtaagaacaacactgacaggagttacggtcgggattgatgtatcgggtgccgagaaaatatggagaacgtt

SEQ ID NO: 382 - DNA, 419 bp, Arabidopsis thaliana
actgaattcgttgtcactctcattgctgttgatgatgagatctctgtaaatgctgcaatgcttcaggaaggaatagcgagaatggagaaacgtcagaaatgggggcacaaaggcaaacaagctgctcttgatgctttagagaagttccaagaggaagctcgcaagtcgagaattggaatctggcagtacggtgacattgagtccgatgatgaggacactggtccggccagaaagcctgctggtggtcgccggtaaaattataaaaaccgataagtcgtgatatggttcaaagggaccatgaggtagggagagaagcttcggtgtgtttctctaaagagtttaaagacatgtcgaactttttgtaaggttttagatttgtttcttctcttcttcttttaatttatatacgttttagactt

SEQ ID NO: 383 - DNA, 419 bp, Arabidopsis thaliana
ttttttttttttttttttttttttagcaatcacaagccccgaacacggcaatgctctttcattatcaaacaaaataaattatgtttactcacaaagtttcttcaaacaatagtaaccaagcagagcattattatcaatatgtttacaacacacacacatcaagccagggttctcgaactctttcatgagaagaggtcttcaagcttttgttctcaccacaagaactgggcacttagcattgttaacacagtaattgctaacacttccaaggaaagtcctttgtaatgctcctttaccatggcttccaaccacaagcatatcaacaccaagcttctcagcagcttcacatatcgcttctttaggatttccaaattccaacacctttcttggagtaaccccagtctcagcacaaattttgg

SEQ ID NO: 384 - DNA, 419 bp, Arabidopsis thaliana
  misc_feature (1)...(419): n = A,T,C or G
gcggccgcggtctggataccgatggaaatgagctgcctagactcatctatgnnnctcgtgaaaagcggcctggatttcaacacacaaaaaggctggagctatgaatgcattgatccgtgtatctgctgttcttaccaatggagcatatcttttgaacgtggattgtgatcattactttaataacagtaaggctattaaagaagctatgtgtttcatgatggacccggctattggaaagaagtgctgctatgtccagttccctcaacgttttgacggtattgatttgcacgatcgatatgccaacaggaatatagtctttttcgatattaacatgaaggggttggatggtatccagggtccagtatatgtgggtactggttgttgttttaataggcaggctctatatgggtatgatcctg

SEQ ID NO: 385 - DNA, 419 bp, Arabidopsis thaliana
  misc_feature (1)...(419): n = A,T,C or G
tcacagatccttttagggtttttccactgtttctaggttttttttattgctcaaatctgatcaatggatagttgtctctctaatcaaacggcgcttcagtttctcccgtcgcgttccaggagacagagcggcgatggaggcggtggttttgttattccggcgaagaggaagatccagtatagttcgatggttgtggttgcggcggcgggacagagtcggtgtgagcctggaagcagtctaaacgcgccgcntgagccacgatcggcgcaggggaggtttctgagaagcgtgttgctaaacaaacggcagctatttcattacgccgccgctgatgagctaaagcaactggctgatgatagggaagctgctttagctcgtatgtctctcagctctggttccgatgaggcttctctccacag

SEQ ID NO: 386 - DNA, 419 bp, Arabidopsis thaliana
gcggccgccaaatggaaacaagtaagaaactgttcaatattcaaatcggaagggtgaagaagagagttgaagattgtatttactattgctaacgaacaaacacattacaattttatcataatatttcaagatcctttaagtatgattctcctaatcgcatgttcacatttaccaagtgatttgaaacaaggcagtctgcggccaatgtgattttggtcagtctatttgttcttctccatgacgcagtatgatttaggccaagaaaacttaagactagactcatactacgcttttaatccctgcattcttgtcgaattcctctgaaggaaccacgtccgcaataatcttttcttgaccgcgccaaagaatcctgtcaatgactccaaattctttagcttttggtgcatccatgtaatatg

SEQ ID NO: 387 - DNA, 419 bp, Arabidopsis thaliana
gtgattgtggaaaagctggacagagtgatgttcctgacattgacaagaagaagtatcttgtaccagctgatctaaccattggccaatttgtgtacgttgtgaggaaaagaatcaagcttggagctgaaaaagccatctttgtctttgtcaagaacacattaccaccaactgcggcattgatgtctgcaatctacgaagaacacaaagacgaagacgggtttctctacatgacatacagtggagagaacacatttggtggatctttctactgctaattacctcagcttctacgtctgatcctcttgatgattgtacattctcgtcgaccttaataatgtcattttactttcttggtttaaccttttgagctctcttactatctcttgcatttgaagatggtatttgaaacaagattctaa

SEQ ID NO: 388 - DNA, 419 bp, Arabidopsis thaliana
atcgacgaaggagttttgagttgaggaagtgagtagaaatcaatggaggaagaatctaagaatggcggaaccacgattccgactgaagaattggcggtggttgcggtgccacctgtagtagaagaagaggagccgatggtcggacctggaccagctccacgaggcaaacgcaagcgtccgcttcaattcgagcaagcttatcttgattcgcttccttctgctaatatgtatgagaaaagttatatgcatcgagatgtagttacacatgttgctgtttcagcagctgagttctttataagtggaagtatggatggtcacttgaaattttggaagaaaaagggtgttggtatcgagtttgctaagcatttccgctcccatctcggtccaattgaaggtctagcggttagcattgatggttt

SEQ ID NO: 389 - DNA, 419 bp, Arabidopsis thaliana
  misc_feature (1)...(419): n = A,T,C or G
tctggctgggggtgctaatgtggagttcaatttggaaaaggaagcagagaggaaatttgcattgaaccttttgggtctatatcagaatatcagacaggcagtcagcgtttatgacgatttatctcatggtattgacagaactgccgaattaacggttggacgctttggtggtatcgatgctttagcacaggagtatggacaaggtatggctaagcaagggatggatgtattactttccacattatcaaagctattcaatctgttggagacatctcataaaggccaaattgttggggttatcgtccttgatgagagagtaaaccaagaatcagaaaatcttttgaactttgggtctnnccgttcatctgcacgctcaatggtggaagtggagggaattccaagtgcagccattatcgctg

SEQ ID NO: 390 - DNA, 419 bp, Arabidopsis thaliana
tcgagcggccgcccgggcaggtaacaaatctcaggcggctcaacactatcctcttctacattttccaacgatggcctcaaacgcactctcgtctttcaccgccgctaatcccgctctgtctcctaagccactactccctcacggctctgcttctccgtcggtttctctcggcttctccaggaaagttggcggcggcagagcagtggtcgttgcagcggctacggtggacacaaacaacatgccgatgaccggagtcgtgttccagcctttcgaagaggtgaagaaagccgatctggccattccaatcacatctcatgcctctctcgctcgccagaggtttgccgacgctagcgaggcagtcattaatgagcaaatcaatgtggaatacaacgtctcctatgtgtacctcggccgcgacc

SEQ ID NO: 391 - DNA, 419 bp, Arabidopsis thaliana
ttgctagagaaagaaaatatatgtaaaaaaaaatgcaaacacaaattaccctttattattattaggtggtttggtaacaaaggaaaaacatggagcttcaagttcctatagtttgagaaatctaactagggtaccacttggttgaggaaatgccctcgagttgaacttcaaccttcaacatatcattcacaacaaaaccctttgatgaatctctgagatcagctagagggataatctgaaagtcgcccgagtaataaaaccaagaagtgtaccaattactaacttgtatttcgacgttattgagtttgcgttggttaagaactcgaagcttggctcgaacataaatcatctcaaagggtttgaatttatcgttaatgttaagatacagcgacatggcttttccctttgaaagattacga

SEQ ID NO: 392 - DNA, 419 bp, Arabidopsis thaliana
ttttttttggatcaatgttggaactgaagataccaaagtgactggtttcaacaatgaaacgaacaatttttccaaaagcaaaacatgtgatatccacaaagtaagaagtgaaaccaaactaaaaatcaacagaatctgcactttaatgaatcagaaagtaggaatggttttggagccgatgaactgtttgagaatcgctttctcttcgtcattccgtttcttctcttctgcgtttttcggatttactttccttttctcctccaacatccatttgaagagctcacgttgttgtttctccggaattggctcacgtgccttgatcaccactggctctgcaaccactgtggaagacaaagttttttccacagtaacaggagctgcaactgaactcgatttagcagccgtctcttcaactacag

SEQ ID NO: 393 - DNA, 419 bp, Arabidopsis thaliana
  misc_feature (1)...(419): n = A,T,C or G
gcggccgcaaaacacaaacacttaaaatgctagaaactatataagtaaaagcagggcaattctccttctcttgccttcaccttactcaaaaatattgaaggtgagaattaaaaaaataaacccaaactgaaagattaagtaaaaaccaaatccaaactccatctcattctcctgagattttgagtaaaaaggatgattcatttgnnntctgtttgaacccgcaaatcatcggttaagctaacgaacctgattcctaatcgataaagctgctaaaaggggttagcttgagttaccggcatataaacacattgcatctgatctttgagaatcatccttggctaatgctaccttcaaaggttgtttttagtcataagctctctctttaagcgttagacatcagtatgccaaaccgggcggtg

SEQ ID NO: 394 - DNA, 419 bp, Arabidopsis thaliana
gcggccgcgattcgaatcattctctctctctttcttgatctgaaaattgagtcccaattccagcaaaattatcaatcgaatttctgatcaactgagcgcgacggtggtggcgacggtggtggcgacggtgacagcgatcgacggttatggcttcgaagactaaaactagtttgtccgaaacaacaactactactactcctaccgggaaatcatctccagcaactccaagaatagcaaaaagaacagttaataaatccgaaactagtaataataattctccatctactactactccacattcacgtctttctcttgatcgttcttctccaaattccaaatcttctgttgagagacgatcaccaaagcttccaactcctcctgagaaatctcaagcgcgagtagcagcggtgaaaggaaca

SEQ ID NO: 395 - DNA, 419 bp, Arabidopsis thaliana
tttatatagaaacaaattcagacactttgaaataaagccaatacaagaaaatgttttagaagggaatgttgtatgttcgttataaacaaattaaagaacgactagccatgcatcagttttcagaccagccttttccagcaaaaaatatcaaaaatcagagttgaagggaactttggtagccggcaaccagttattgccgtctataaaaggtttcaccgtaaacttatttgcttccttctttgttaaagacgtcttcaacccttgccacttaacccggttcttggtcgatgctcctggcccggaatttaagtactcggcgtaaaagatcgtgtctggcgcggtatctcctgtccacggtaaccaccctttcgggttgatgaatttgtccatgaacgacttcatgataaccgttgtagaga

SEQ ID NO: 396 - DNA, 419 bp, Arabidopsis thaliana
  misc_feature (1)...(419): n = A,T,C or G
gcggccgctaaaaacccgagaaaagtggaagaagaaggaaggaagaagaagacaagagagcattctgattcatgtgactctggtttcgtttctttctgtgtctctgctgtgtcgttttctcggcatatttctgatctttcgttctcggttggtttttggtttctgggtattgattgattgattcaaaagtcttcaannntcctggaaactggatctgggtttatccgtttttactcgtctgagaagagaaaaaaggatgaatccttatgatgcgaaagacagaagatggattctctctatgttcttcttcgtcgttttgttctgcaacaacgtttcgacttcgtcttcttcatctgaagttatcacgattaagccaagacatttatccttgctaaagagtgctttacaacggtcaagtg

SEQ ID NO: 397 - DNA, 419 bp, Arabidopsis thaliana
  misc_feature (1)...(419): n = A,T,C or G
tcaaaagacacaaatcctgctcaaccagattgagagatccaggatacaggagaaaaaagcattggaagaaaaccaaatcttgcgcaaacaggttgagatgttggggagaggttcaggaccaaaagtgttgaatgaaaggcctcaagattctagcccagaagccgatcccgagagctcttcatcagaagaggatgagaatgacaacgaggagcaccattccgacacttccttgcagttggggttgtcgtcgacggggtattgcacaaagagaaagaagccgaagatcgaactggtctgcgataactctgggagtcaagtggcttctgattgatggaatcgattatttttctaattctggttnnttaggggtctctatgtgtcttcttgtttctggctgttcttttgctttatttcatctc

SEQ ID NO: 398 - DNA, 419 bp, Arabidopsis thaliana
ctatcgttcttaggaaggcgttttccagaaggaatggagcagttaggaccaagaaggggaagaacaaggaaatgccacctgaatatgcggctgtgatgatccagagggccttcaaagcttatttgattcgtcgctcaaaatcattgcgtgctcttcgtgatcttgctattgcaaagactaaacttaaggagctaagagcttctttccacaacttcagctaccgtcgcctgattgctcgtgatggagaggagcgtcagaaattctcagagaagatcattgtactcctcctcactgttgacgccatagagggagttgatgtgatggttcgaggagcgaagagatcaatggtggatgagctggaagcaatgttagatgtggtagacccgcaaccgcaggggaaatcattgtcgatgagaaga

SEQ ID NO: 399 - DNA, 419 bp, Arabidopsis thaliana
  misc_feature (1)...(419): n = A,T,C or G
ccgagaataataatgtacccgccacctccctcaagcatctacgctcctccgatgctggtgaattgctccggttgccggacgcctctccagctcccatccggcgcccgatctattcgctgcgctctctgccaggctgttactcatatcgccgaccctcgcaccgcccctcctccgcaaccttcctccgccccttctccgcctccccaaatccacgcgcctcccggtcagctgcctcacccccatggcaggaagagggcnnnnntctgtggcatctcgtatcgtttctctcgccacgagctcaaaggctgcatcaacgacgccaagtgcatgcgtcaccttctcatcaacaaattcaaattctccccagattcaattctcatgcttaccgaggaagaaactgatccatatcgtatcccgac

SEQ ID NO: 400 - DNA, 419 bp, Arabidopsis thaliana
agtgtagaggcagtggcacaacatctttaagaaagagagagagaaagagtcatttattcatttcctcgcttaaaaatcttgagcacccagacagaattcttctttcttctttctggggttgagaaaaatgagtgaaagagatgatggattggggctaagtttgagcttgagtttaggttttaatcaaaaggacccgtcttcgaggttaaatccaatgcctctggcttcttatgcatcttcatcacacatgcagcatatgcagcagagcaattataaccatcctcaaaagattcagaacacttggattaacatgtttcagtcatcagagagaaactcggacatgagatcgtttctccggggaatagacgtgaacagagctccatcgacggtggtggttgacgtggaggatgaaggcgccg

SEQ ID NO: 401 - DNA, 418 bp, Arabidopsis thaliana
  misc_feature (1)...(418): n = A,T,C or G
ccgttctccatcggtaaacgcagctgaggagctaaataattctctgatatctgcgnnncgccngtgtggaagcaaaatttaggttaatcggatctcaattatggacgaagaggcagcaaaacctagagactccaccgtgaatcagcaacatcaatactattacggaacgtttcaaggcgttgcgaattttcctactcctgctccaccaccgcaatttatgcaaccacagcatccgattactacgtttcctggacatgcttaccaaaatctccaaggtcatggtggtggtgtgaattatgctcaaggattcccagttgttgttcctgattatacagtggttgaggtgagaccaatgatagagcatgaacttccttgttgtggcttgggcatgggctggtttctgtttatcatgggcttc

SEQ ID NO: 402 - DNA, 418 bp, Arabidopsis thaliana
  misc_feature (1)...(418): n = A,T,C or G
tgaaaattatgatatcaggagctcctgcttctggtaaaggtacacaatgcgagctgattactcacaaatatggtttggtgcatatctctgctggagatttgctgagggctgaaatcgcttctggaagtgaaaatggaagacgtgctaaagaacatatggagaaaggacaattggtccctgatgaaatagttgtaatgatggtaaaagatcgtttatcacagacagattcagagcaaaaaggatggcttttggatggatatccaaggagtgcatcacaggcaacagctctcaagggatttggattccagcctgatctattcattntcctcgaattattctgcaacagattgctgaaatgtttaattctggcaaatcagtcttaaaatccggacaactgataataaaactaggttcctga

SEQ ID NO: 403 - DNA, 418 bp, Arabidopsis thaliana
gctgttaatgcagcttatggtggcgttcctgttatcataaccagtggatatgcagctgagaatataagtaaagtccttagaggactgcgtgttggtaccctgttccatcaagatgctcatttatgggctccggtcgtagatactacttctcgtgacatggcagttgctgcaagggaaagctcaagaaagcttcaggccttatcttcagaagataggaaacaaattctacacgacattgccaatgcccttgaagtaaatgagaaaacaattaaagctgagaatgatttagatgttgctgcagcacaagaagctggatatgaagagtctttggtagctcgcttagttatgaagcctgggaagatctcaagccttgcagcttccgttcgccagctagccgaaatggaagatccaataggcc

SEQ ID NO: 404 - DNA, 418 bp, Arabidopsis thaliana
tgtatgaaggatcattgatgatgaatggtccatcgactcagacagtagaagagatagtgtggatcattgaagaagctcggaaacctatcaccgtagctactggactcgcaggtgctggtggctctggtggaagcagtaatggtgccattggaagtagcagtatggatctcgatgacttggacacagatttcgacgacatcgataccgctgatctcctttcccctttgtgaacaattgtatcaaaaaccaaagatttcatgtttctgaagcctgctgatactactacacattgatgatacacagacgtgaatataattgttcactaaaatgtataattagagtgtgaaaacatttgtctttgattacaaaaatgttctgttagacaaaaaaaaaaaaaaaaaaaaaaaaaaaaaaaaaa

SEQ ID NO: 405 - DNA, 418 bp, Arabidopsis thaliana
aaaaatgtcaggccgaggaaagggaggaaaaggattaggaaagggaggagccaagagacatcggaaagtactcagagacaacatccaagggattaccaaacctgcgattcgtcgtctcgcgagaagaggaggcgtgaagcgtatcagtggtttgatctatgaagagactcgcggcgttctcaagatctttctcgagaacgtgattcgtgacgccgttacttacacggagcacgctcgccggaaaactgttacggcgatggacgtcgtttacgctctcaagagacaaggacgaactttgtatggattcggcggctaaatcgttcggattgcaatttcggattttgtaaactcttcaatttcagcatctagggatttcagatttgtaatttctcagttaaacgatgaatgaattgaaaaa

SEQ ID NO: 406 - DNA, 418 bp, Arabidopsis thaliana
gcggccgcagagacccaagcaagagctcaaattagggttatttttccgatttgagagatccattaacaatggcgtggtcgtcggaaacgccgtcgtattgcggctggaatgagcgacatgtgaagaacacgaaagaaaagatggaggttcattattatctcgagaggaaagatggaattgcagatctagctgttattgggaggttgaagaattctaaacgcatgtcttttagatacgctttgaagaagaatcgctctgtcttgaaaaagcttaattctaaagatgatgttgcgctttggctcgattctattgtttctgctaaacctattaatgacttaattttgctgcagacagatccggtttccaccttttggtgagatacctcatgtagcagatgtaccagctactgttatgactg

SEQ ID NO: 407 - DNA, 418 bp, Arabidopsis thaliana
gttaagaactgggtagtatatttctgtagtcaaaacaacaaaacccaagcttgggatttctatatcggttacaaaaacaattgttatgagatcattctataagagagatgcaaagagcaacactcatgccaagaatcaaagatatcaaatggcaggcactgtttttaagtgttgattttcccgagttgttcatttctgcaagaactccagcaacagctatgtatatgaatcctcccgctgtgaatccctcaatcaacgatgattgtcctggttcatttccccagaccaaaaccaatgcagttccggcaagtgcgacgagtgcagagaggaagttgaagaagagtgcttttgttactgtgaagcctgatcttactagaatcccaaaatcacctatctcttggggaagctcgtgggcaag

SEQ ID NO: 408 - DNA, 418 bp, Arabidopsis thaliana
aagaatcaaagcgagaaaatcaactttaacatgcaggttgtgatttggtggtctggtctcatgagaggtgctgtatctatggctcttgcatacaacaagtttacaagggccgggcacacagatgtacgcgggaatgcaatcatgatcacgagtacgataactgtctgtctttttagcacagtggtgtttggtatgctgaccaaaccactcataagctacctattaccgcaccagaacgccaccacgagcatgttatctgatgacaacaccccaaaatccatacatatccctttgttggaccaagactcgttcattgagccttcagggaaccacaatgtgcctcggcctgacagtatacgtggcttcttgacacggcccactcgaaccgtgcattactactggagacaatttgatgact

SEQ ID NO: 409 - DNA, 418 bp, Arabidopsis thaliana
acatgtgatccgaattcacatataacaatagaaaacgtacaaaaatgaaaataaaagtagtgtaagtagactgactaataaccacttaaatcaaacaaaaccttagaaacatggaaactgatcattaagactattataataaccctaacataaaaagatccatcagctttcccttgtttctcacgcaaactctgaaaatgccaatttgaggaaaaccttctcctttacttttgctattgcctctctcttatttatttctgctctaccttgtccgaagcatgtatcctcctccctgattgcttctctaccgtctgaaacaaaccgttgaagcaagcacgaaaagattcgcattaagaacaccaaaaaggacaaggatctttctcccaagagcagaaaccatttgctacgataactctaa

SEQ ID NO: 410 - DNA, 418 bp, Arabidopsis thaliana
tttttttttagtgcaattgcaaatgctaccattcaaactttatgtacaatgtaacatcaatagaagaattatgttgcaaattgcattttctttttcctttttgttccttccacttatgggttcagaatttgaaaaaaaaaacagcttttaccttctttcgtttgctttccataccaaaggaagcaaacaaaaagaggctgatgaagaaagaagaaacaacataactgttaaatagttttaagaaggtcattccttttttttttatcataatcaattcccattgcatcggtgaatcacaccattactgctacttccttgcactagcttcttcttctggttttgttggttaatccggtcaagtccccatatccttattgttccatcatcgcttgctgaagccaacatgtgtagattcgtc

SEQ ID NO: 411 - DNA, 418 bp, Arabidopsis thaliana
  misc_feature (1)...(418): n = A,T,C or G
cctctagagcggccgcccttttttttttttttttttttatcgtcaagacgatcctttcaatagtatttttctcttttattttctacaaatcccaacaccgaacaaaaaaaacaaatgaaagattgtttagcaaaccagacagcgatttgtccaaagatttgaagacgaaaaagaaataacacctattctacccacttcagggcccatttggtggtatcttctcagggcttgagagcgagagcaatcccaaccttggcactcttatcgatcgccttagaatcaacctctccagaaacggtgaagaacgactttggacgccactcatgttggatcagagcgttnnnacaccagcattgttcactcttgccttcactgtggtcaatgggtcaagcgcgtgttgagttccgacagtgatggc

SEQ ID NO: 412 - DNA, 418 bp, Arabidopsis thaliana
tttggtggttcttttctctttattatcattcctcgtggatccagaaatgagaaatccagcaaacttaacaaaaagaatcaattctctatgtaaagttttctcgattcaacaatagatcaaagattctgccagacattgggacacggctttaagaaaaagaaaataatgaaaggccatatcatatggagtaccttgattcttcagcaaaaatttctcaggacgaagcagagaatgtcaagaaaacccctgatctcgcttgatcgtgttcctgtttcttcaatatgtggcagtaattaagctccatacggaataggcttgttggtaagacgattccagcaccaactgaagttctgaatgtctccaagaactttggagcagtgaagtttctaaactcattctctgataacttcgccatatt

SEQ ID NO: 413 - DNA, 418 bp, Arabidopsis thaliana
ggccgccctttttttttttttttttttgtatagaacttacacttcatcttttattccaacaggcattagcccaaacatataaaccccaatattcttttacaattgaaatgcatcaagccgtcaacagatatacacccaatgacccaaactgaacaaaaacaaaaaaagttaaaacagaacagaagcaaatgagggagggagggagagagagagagagagagagagatacacatggtggatgattttcagcttattcccagttgcagactccaaagtttgttttatctactattaaggcaaatgatgatcctgctgaattatttttagaagatgtgaaggggcgagagatattacgtgaaactattgcacaccgcgatcaggcagtcgacttgaagttgccagattcaaatggttagag

SEQ ID NO: 414 - DNA, 418 bp, Arabidopsis thaliana
  misc_feature (1)...(418): n = A,T,C or G
gcggccgcctcaactctcttctcgaaaacctagcagtcgtctctttctcagttctccatgggaaagtctaaatccgccaccaaagttgttgcagagattaaggccactaagcctttgaagaaaggcaagagagagcctgaagatgatattgacaccaaagtgagtcttaagaagcagaagaaagacgtgattgctgctgtccagaaggaaaaagctgtgaagaaggttcctaagaaggttgagagctctgatgattcagattctgaatctgaggaannngagaaggctaagaaagtcccagccaagaaggctgcttcaagcagtgatgagtcatctgatgactcttcttcagatgatgaacctgcacccaagaaggccgttgctgctactaacggaactgttgcaaagaagtctaagg

SEQ ID NO: 415 - DNA, 418 bp, Arabidopsis thaliana
gcggccgctcctgctctctcgctttccctctcaaatctcgatctctctctctccctcgtcctccttcttcctctctcaatttgacgaaacctctccgatctctcgattctcgcttctccttactcaaatctccacttcccgtctctttacgccggagatcatcaactctcgttaaagcctcttccaccgtcgcttcagcttcctcttctccaactcctcctttggttccagctccggttccatggcaaggagctgccattaagcctcttctcgcttcgatcgctactggtttgattctatggttcgttccagtccccgaaggtgtcactcgcaacgcgtggcaattactcgcgatcttcctcgccaccatcgtcgggatcatcactcagccgcttcctctcggtgctgttgctctaat

SEQ ID NO: 416 - DNA, 418 bp, Arabidopsis thaliana
gcggccgccctctctctatctatccccatttccatggaagcaagcagatgtgttcttacatctctttctctctctacagccttacatgaacagtgactgttctctctctttccctctccttccttttttcttctacttctccttccctttgcttcgaaaagggtatctcgtgatctttatcgctcaaaaatcttcactttcagatcaggccactcgttgatggaatctgtgacagtattgattactagagagtaaagacaagttctttaaatctcagggaagaaggaattggtgtttaagattgctctgtgttaatgatggcttcaaaaactccagaaggatcacttaccaattccagtcaaagtatgtcaatcaacactttagcagatcaagtatcttcgagtttgtctttcgctga

SEQ ID NO: 417 - DNA, 418 bp, Arabidopsis thaliana
  misc_feature (1)...(418): n = A,T,C or G
tttttttttttaaagaatatatgtctccattgatcagatatgattaacaaaataggacaacaaattgaatgaaggaaaanangaaccaagtttcataactatagatatggtgttatgtacaaagcgctaacacagtgaactagccagtgtggtatggtgatattcttaagaaattttgcagactaaacaaatcttcccaaccccattcgctatacactaccttcgaatgccatttcctacgtctgtgaacctgtcgactaatcattcttttgttgtttgcaccgaataacagtgtttgacaatgcaggagttgcttcatagttcctgtaaannngtcaagctcttaggcttattagcagcttctgacttcattcaagtggattcaaccttggattatacagtgtagtctccaactgat

SEQ ID NO: 418 - DNA, 418 bp, Arabidopsis thaliana
ctgctgatgtgttgtttagttattccaagtttgcaatggcctgcattggtaaccatactcgtcctactgacatgaggttgcatttgatgaaggagatctctggaatgccaacttctctgaaaggaagagactcttctagagcagcttctcctgatccacttggcgaatcatcaagctccggtactgccaggctagataaaacggatagtttcagggcactttgattttagtttttctccacttgtcagggtctcataagatatatgctagtggattacaggataagtatctgtggccgaggaacctacttatcaagttttaacttttgatttcgcccatgatagtgtcaaatgttattaatgctgtattctcagatgtgtgtttctgaaaaaataaatgctatgctgctacttcgagg

SEQ ID NO: 419 - DNA, 418 bp, Arabidopsis thaliana
tacacgtagagatgcctttaggcagcgcaagccgaataccagcaggcctccctctatgcatgtagatgattatgttgctagggaaagaagtgttgatacagctggtaattctaatgcaataaccatttcacgagcaggatctagcagtggtagacctccatctattcatgttgatgagtttatggccagacagagagaacgaggccaaaatccctccaccattgtggttggagaggctgttgtgcaagtgaaaaatcctactcctgctagagatactgaaaaagttgcaggtaaacctaaacaattcaaagccgatcctgatgatgatctacaaggaatagatatagtttttgatggtgaggaatgtgaaggacctgatgacaagttgccctttcttcagcccgatgagaaccttatg

SEQ ID NO: 420 - DNA, 418 bp, Arabidopsis thaliana
gtagtgccattggtgactttggagactccaagaccgtttctctctgtgtcaagagactagtttacacaaatgatggcggagagattgttaagggggtctgctccaacttcttgtgtgacttgaagccgggtgatgaagctaagatcactggacctgttggcaaggaaatgcttatgccaaaagaccccaatgccaccatcatcatgcttggaacaggaactggaatagctccattcagatcatttttgtggaaaatgttctttgaggagcacgaggactacaagttcaatggtttggcgtggcttttcttgggtgtacccacaagcagctcactgctatacaaggaggagtttgagaagatgaaggagaagaacccagacaacttcaggctggactttgcggtgagcagagagcagac

SEQ ID NO: 421 - DNA, 418 bp, Arabidopsis thaliana
aaactccattttagtagcaagcttagatctcctccttccacagtcactttctctgcttttgtttcttcaatcgatttgcttcagatttccccagattatatagaattcgatgtcaagacacagaattcacatgggttttgtctaaaaatcataaaatcatatctttttacggatttgaagatgaatcagaattcctctgttgcggaggcgacgcttcagcttaattccggtgaaaaaccatcgccgggatcgattccgtttatctcctctggtcaacacggaaacataagcacttcagcgacgagttcgacaagcacaagctcaggtagtgctcttgccgtagttaaatccgccgtgaaaaaaccaactaaagatcggcatactaaagtcgatggtcgtggacggcgaattcgtatgc

SEQ ID NO: 422 - DNA, 417 bp, Arabidopsis thaliana
tttttttatttttttttttttttcctcaaatatttctttcatataaagcaaatgaattcataacataacagagatacagtaggaaaccaatacagagacaaactttacaaattacaaatagactaacgctagtgtctcatccaaaaccagaatttggtgaaaaaattataattatgaaacaagcacaagttcatcaagcgaggaaaaaggattataaaagggaacgatagtaaccgaggctagaaggagttccagttatctgaccttttcgtagggctttcatccgaagagactttaaagggacctgtggaaccaaacgggtctgcatcatcaaacgagtatccatggctaccactgaaatcctttgtactattcatagagtcgaatcttgatagcgagggaccaccaaagtctttg

SEQ ID NO: 423 - DNA, 417 bp, Arabidopsis thaliana
acaagaaaaactagttgtatagagattttttttggttcatcccaagatgggctaaaaactgtaaaaacggatactaggaattgtatacaccacaaaattacgtataagaaagtctaaacaaaagtaaggtaaaaaaaaccaacacagtagtaatccaaaaatccaaaatctaaaagaaatagcctctatacgcttgggctgggcctataacccgttgaagatccggattcatgaagtccgggttcgggtcctaaattggatctccctcttttcacagagttcatcttctccaatttgagtccggctctgaatcttgcgatgaaatcatcggctttggtatctacgtcggggctcggacagaacatactcccggcggcctccttacttccagctgattgagctacatccggatcatca

SEQ ID NO: 424 - DNA, 417 bp, Arabidopsis thaliana
  misc_feature (1)...(417): n = A,T,C or G
gagcggccgcccgggcaggtgtgggctaattctgtcaccccactttgctccattgagattcacacctcgggagctatagaagatcaaccttgtgaagctcttgaagtagattttgcagatgagtattttggaggccttactctgagttatgatactctacaggaagaaataaggttcgtgatcaacccggaacttatcgctggcatgatctttttgcctcgtatggatgcaaatgaagcaattgagattgttggtgttgaaagattttcaggttatacagggtatgggccttcgttccaatatgctggtgattacacagacaacaaggacttagacattttcaggaggcnaaaaacaagagtcatagctatagatgccatgcctgacccaggaatgggacagtacctcggccgcgac

SEQ ID NO: 425 - DNA, 417 bp, Arabidopsis thaliana
tcgagcggccgcccgggcaggtcggacgcagatgactaacagttacgctctgtcaccggcgattatcgccgccgttcgtcctccggcatctcaagactatctagttgctgcttctcttagtggacgcaaatcgatcaactcttcatcttcgtccattttcgtacctatctcattatctacttcctacggtcgaagcaaatgcgccttctcaatctcgcggaagaatccaaaatcgacgattcgttgcgatattgctgtgaaatcggcggcttctgtagacgcggacgctgatctatcgtcatctacgtcgttggagacggaggaagacgagaaagcgaaggagaagattggagctagggttagggttacggttccgttgaaagtttaccatgtggttcgtgtacctcggccgcgacc

SEQ ID NO: 426 - DNA, 417 bp, Arabidopsis thaliana
catgaaatacacatcgtgctttgatgttgcccataccaagttcctcagcatattaacaaaggtttccttatggcgccagctgctctcccaacctgaaaatgcgctattgtggacttgacaagccttgtgttgaactgaaagtcataaaagttctttcctttctccacttgcaagcattccttatcaagctcttctctggatcgaaagagagactcgaaatttttatagtgtagcaatctgttctcacggtatctatccctcgtgtaattcaggctctcccatggaatcccttgaatatcttttccattcctagcttctaacgctgatgtttcattgttcgtcttactctgactcagctcgaaatcaaaatcggagtccatgaaatcggaatcagaatcactggtgacatcaacctct

SEQ ID NO: 427 - DNA, 417 bp, Arabidopsis thaliana
tccgagtccttcggtttttgctggctggtgaagcgtgttgtcgaagagagaaatctcaagctgttgctggtcctggtcatagtgtagcagtcacatcgaaaggagaagtttatactttcggatataataactctggacagctaggacatggtcataccgaggacgaagctcgaattcaacctgttagatcattgcagggagttcgaatcatccaagcagctgctggtgctgctcggacaatgctaataagcgatgacggaaaagtttatgcgtgtggaaaagaatccttcggggaagctgaatacggagggcaagggactaaaccagttacaactcctcagcttgtaacatctttaaaaaacatatttgtagtgcaagcagctattgggaattactttaccgctgttctctcccgag

SEQ ID NO: 428 - DNA, 417 bp, Arabidopsis thaliana
agagaacgagagagagaggagaacaaaatggtaggcgaagaggagacgaagaagagagtagtcactgaatcgctaggatggttaacggaatcttcgattatgccaaagaagcatcgcgccatcgaaggtgttggtccttcctcaatcatggagcttaaagctcagctctataagtctcaggaggaagctaaacagacaaaggattttacgggatccgatgctcaataccatcgcgccaaagaaaggattgccgccaaagattctttcgccgcgaaaaactccggcgtcgaaagtcgcaatttaaaggacaagcttgagcacaaagctgtaaaagatggagcagttagttatgccgcattggagaaaaaggctcagttgtatgataaacttgctagaggagagctttctgatgaagaa

SEQ ID NO: 429 - DNA, 417 bp, Arabidopsis thaliana
acttttaagtttgctcctagactgtgcgaagaaatcagatcagacagttgtttcaatttcattaggagcattggttcacctcatcgaggttggaggccaccaatttagtgagggagactgggatatgctcttgaaaagcataagagatgcatcatacacaactcaaccgctggagctgttgaatgctttgagttttgacaatccgaaaaagaacctagttttggcaggagacatagaggccgatgcctctgattctccacgagttgatcgtaatccggacgatattaaagataatgggaaagtgtccgcccaggcatctccaaggattggtactcatggtacttccctagaatctgggataccgcctaaggctgatggttcggaaggtcgtccatcgtcatctggaagggctcaaaa

SEQ ID NO: 430 - DNA, 417 bp, Arabidopsis thaliana
ttcccgatttcgtcgcctcttctcgtctctccgctctcctcgccgcgagtctgtttcgccgccgtctatctcccaattccgtgaccgttgttgtttagtgaatcgatgatttacactgctatcgacaatttttacctatccgacgagcagctgaaggcttcaccttcgaggaaagatgggatagatgaaacaactgaaatctctcttagaatctatggatgtgatctcatccaagagggtggaatattgctcaaactgcagttatggctactgggcaggttctgtttcagcgattctattgcaagaagtctttggctaaatttgatgtcaagatagttgctgccagctgtgtatggcttgcatcaaaactggaagaaaaccctaaaaaagctagacaggtcatcatcgtattccaca

SEQ ID NO: 431 - DNA, 417 bp, Arabidopsis thaliana
  misc_feature (1)...(417): n = A,T,C or G
tttttttttttttttttttttttttttttttatagaaattagagtaataatccataaccataaatcattttatacaataaacacgttctgataagaagacaaacaaggcggacaaacacccttagaagatggattgaagcaaatatagatcaagtctatattgtgcctacaaaatgagaaatctaagtttcgagtatgatcaagtatcttagctttaggctagagaaaccaatctcttttattctttgcggtgtggtttgatgtatagtatggancctaaaannnnctacgtctaaactgaagatccagccaaacgtcttcttgatgcatttgaagtcgcgacttgacccaatttgtctgactctttcgagtcatccgtcactattctctctctcactggtgtgtaatgcctcagcc

SEQ ID NO: 432 - DNA, 417 bp, Arabidopsis thaliana
ccacgcgtccggtggctcaagctttacttttggtttatgagaaagcagaagctgaaggaaggtacatctgcataggccacacggttagggaacaagaagtcgctgagaagctgaaaagtctttatctaaattacaactacccaaagagatacatcgaagcggatggaaaagtgaaggtgagttcagagaagttgcagaagttgggttggacttaccggccgttggaggaaacacttgtggattctgttgagagctaccgcaaagctaagcttgtggactgaaaactgggaacgaatagcatatgagtgttttgggtccatgtgttaagtgttcctatctgcacacgctctttcatcttttactcaagaataagagttgtgcaacatattttccatcaaaaaaaaaaaaaaaaaaaaa

SEQ ID NO: 433 - DNA, 417 bp, Arabidopsis thaliana
ccacgcgtccgagaaagagcaatggtgaacgaaatggtgtcgaagatgacaagtgtgtgctgggacaaatgcatcacaagcgcaccgggaagtaagttcagctcaagcgagagttcttgcctcactcattgcgctcaacgctacatggatatgagtatgatcatcatgaaacgctttaattcgcagtaagattgattggagatatcatacttgttgggattttaatttatcctttttttgtttctcttggcaagtgttgaaatcccttttattactctagtgatcttgcaagagtattctcggataagtgttttaggtgtttctttatggttatgtgattgagattgttattgatggctagtaatatattaagagacaagtgttgaataatgtggttttaataaaaaaaaaaaaaaa

SEQ ID NO: 434 - DNA, 417 bp, Arabidopsis thaliana
acattatacaacacagtcgatatcattggagcaaaaactctttataaactaactaaatgatgattagaacaaatatagatatattccctttggcttttgacttcaacacaattcaagaacaaatgatagtgtgacgaagcgagacgacatcgtttccaggtctcaagcttctgaccgaatcagggagaacaatcctttagccatatatagaatcgacaaattgggttgatttttccgactttgacttagccctcaagataacctttgttttgcaggtaagagatgatgttctcagccatctgacgtggcgaacacgactcgtcgtctcctgtgtgtttcagcactacctcgcaattcactggtgcctcgtaagggtcgtcgattccagtgaagcctttgattttgcctgcacgtgca

SEQ ID NO: 435 - DNA, 417 bp, Arabidopsis thaliana
agtttttcggcgatgggagacgagcagctggcgattgtgatggccgatcgtgaaagagatcgagaactttgattcgcttcgctgattccggcaacaaagacgatgtttgttcattaagggtttggcatcgaagaagttcatgaaaggctgattactggcagctctagcgcgatttttaaatcagatcatcccgccatgacctcacaagcttgtctcttcagaatcagctcaaagcagacaggaaagaggcgttaaagatttggtgcaagctgcgactctgtgatcacaactccacaccaagtatcctcttacatcgcactcgtcgctcctgcactcgtagtttctttgaatagccaatgaagagtaaagttcaattatgtgtgtcgtgtttagtaatttgacttgaaaaaagagttt

SEQ ID NO: 436 - DNA, 417 bp, Arabidopsis thaliana
  misc_feature (1)...(417): n = A,T,C or G
tttttgaaaatgtagtaagaattttttctttctcggtagtaagattaaaatccattcaaaagactactaaaaaaaaatctaaaactaattttgttatagaaaaaaaattacaaaaccaacccctctatttctcaaaatattacaaaactaccaaactaattaattcttcaagccgaaccaaacaccaaaccactcacgctaggagttacatgctcctgcatcgtggactggtgatgacggtgctctccttcgtacgtcacaatcaacatcgttgaatcatccaaagctctttccacgtgtttcctcgctggacatcctctaaatgtactacacttgtaataaccccgtggatgtggtgagcntttgatcggtttttgtccatactttctccatgaatattcgtctggtggtatatcg

SEQ ID NO: 437 - DNA, 417 bp, Arabidopsis thaliana
aaaagcacattggtttaatcccaaaacccaaccaaagttttcttccaaaagtgtaataacttgaaacatacagagaactcttgctttgtcttacaaacttatacaaaaagtcaagagaaaccaaaacagatcaaagaaacccaaaagtaaaaagatttaaacaacaaaagaggtaataaataaataaagaacactaaaccaattgtctggagataaaaccaccaccgtgaaccaaaaccaatgtacagtaacacaatgtgaaaaccacacaagactgataaacttcaccagcgagttgaactaatatgaggttgttcaatgatgaactcagtaactgaatggtgtctgtgggtaaaggcggatcgttggagcttccggaactttctggaaatgtcggtgattgatctgaagatgagc

SEQ ID NO: 438 - DNA, 417 bp, Arabidopsis thaliana
  misc_feature (1)...(417): n = A,T,C or G
tttttttttttttttttttttttttagactacaacttacttttataaactttgttaattgtcataaaaataaacatagatccgagtaaatatagatatcaggtacaatgaaaatcaacaaccctttgaaatagaatagatccatacactcttactttgacaaaatagaataggcacacacttatttgactatgattttgttaattttgaaatcacatttatagtcttcaattatgttgtaaacaacctaaactttcacaatttcgtccaacaatattttgaaattctctaaagagcttcctttcatggagaaatcttcttggagtttttctttaagcttcttggcattagnnttcatcgtcttaccatcatcatgaacaaaaacatcattcaaacacttctcaaatccttctttcgt

SEQ ID NO: 439 - DNA, 417 bp, Arabidopsis thaliana
  misc_feature (1)...(417): n = A,T,C or G
gacgtcgcatgcacgcgtacgtaagcttggatcctctagagcggccgcccttttnnnntttttttatctaaatttaagctgctaaataatcatcaaaatgtaatttaaatacaataatgtgtttattcaacaattatacatacacaaatatatatcaaccctaaccagaatgtgatacttgtttaccaagccatcaaatctaccgtgctttaggttcattgatctccgaaaatactccccaactcgaaccactcctctcatcaccaacaactagaacagagtcatcggtcgtggtcgatttcccaacgtgtcctgtagtcctactaaacaagtcatcttctccgtccgtggtcgtaccaacttcaccacttggcattagatccagagactccacgttgtcattcttcttcttagcag

SEQ ID NO: 440 - DNA, 417 bp, Arabidopsis thaliana
  misc_feature (1)...(417): n = A,T,C or G
gcccttttttttttttttttttgtttttttttcaatgaaagcattttttgcattattttcttgaaaagtcattacatccaaattatttttttttagccatgaaaatatacnnnctctatctcactcttttatttttacagtataattcatatgtacattaattgatctcaaacattgctttgtgtaggacagttttggttactttggtcatatactattagagtgtaaaaggctcggcttctgatggaacttcacgagctctttggctctcaagtggcatatactgtgacatgatcgtcataatctcagagtccatgtaagacctgaaccggtatttgtagaatatataaccagctaaaccggctactgcgacaatagctagtatcaagagtgtgagccaccatgctgttttggatc

SEQ ID NO: 441 - DNA, 417 bp, Arabidopsis thaliana
cctctagagcggccgcccttttttttttttttttttatcgaacaagtagcatagatatctcaacatgaaaatctagtaatacatgtaaagaaagaaggttaatgatattccgcatgttcatagataggactcgaatctttctttaccacaagaggggtttacaatgatacaatgatcatgtcctagaagagaaggatcagatgggttggtctttgggaacgatctgatccttgatccacatgtagatagggattaacacaaaccaggcagctgctagagttcccaggaggaagcgtcccaagaaggagaaggggttgttgacaggcttctctacgtcctcttcctttggaccaagctggagaggagagtcaccggaggcaggtttaacaccagtgacagaacatcccatgataaggc

SEQ ID NO: 442 - DNA, 417 bp, Arabidopsis thaliana
gcggccgcatttctataactaacacactcgaagtttctctgctgtcacattacatggagttttgatattgcaggcctagtgaaatatggtggctttgctttgatcaattttcatgaagtatcttcaaacactggacaggatcaagctctaccatctgcgagctccatctgttcgtgtagcaatgtaatttctcagagaaggagactgggtaagaccatctggtgcaactgtggtgttctgagttccattcttctgcttcatccttctgcgtgctatgtaacctctgacccaaggagtaacatcctcgttggtcttaatcatgatgaagaagatgatgcggtagatgataatcatgctaagaatcacactgaggttaatccattttgatcgatgcaagtcgatctgaaagacgttctc

SEQ ID NO: 443 - DNA, 417 bp, Arabidopsis thaliana
gcggccgcgcgatgagttcatcaacaagaaagcttgaggttgtttcaccagttcccgccgatatcgacatagctaattccgtcgagcctttacacatctctgagattgccaaagatcttaatatcaaccctcttcactacgatctctatggcaagtataaagctaaggttttgttgtctgcgtttgatgagcttcaaggacaagaagatggatactatgttgttgttggagggattactcctactcctcttggagaaggcaagagtactaccactgttggactttgccaagccttaggcgcttacctcgataagaaggttgttacttgtcttcgccaaccgtcacaaggacccacctttggaatcaaaggaggtgcagctggtggtgggtatagtcaggtgattcctatggatgagt

SEQ ID NO: 444 - DNA, 417 bp, Arabidopsis thaliana
tgagcaaaccagagccgctgctttagctgagcttagactcatctccaaacaagatcctgatagccgtctaatcatcgccgacgccggagctattccgtacctcgccgagactctttactcgtcgtcacactcttctcaggaaaacgccgccgcgactctcctcaacctctcaatcacctctcgcgaacccctaatgtcttcacgcggcttactcgacgcgctttctcacgcgcttcgtcatcacgacaccaccacttcccccgccgcggttcaatcctccgccgctacgatttatagccttttgatagccgaagagtcttaccgacctatcatcggatctaagcgcgatatcatcttctccctcattcacatcattagatatccagattcgcatcctcgatcgatcaaagactcgct

SEQ ID NO: 445 - DNA, 417 bp, Arabidopsis thaliana
ttcctcattttctttcgggcgacattgatttgacgcagattctctagatcagtttttggctgccgccattgatgccgctaaaaaagctggacagatcattcgtaaagggttttacgagactaaacatgttgaacacaaaagccaggtggatttggtgacagagactgataaaggatgtgaagaacttgtgtttaatcatctcaagcagctctttcccaatcacaagttcataggagaagaaactacagctgcatttggtgtgacagaactaactgacgaaccaacttggattgttgatcctcttgatggaacaaccaatttcgttcacgggttccctttcgtgtgtgtttccattggacttacgattgggaaagtccctgttgttggagttgtttataatcctattatggaagagct

SEQ ID NO: 446 - DNA, 417 bp, Arabidopsis thaliana
gctgccagaagataataaagcttccttctttcgagtaaaggaagcaaaagcaaagtgtgtagttactcagcaatggcgagagacttcaagcttatcttctccatttcaattctgcttctgcttctagactgttgttacggtggcaaggtcggagtttgttacggaagaagcgccgacgatcttccaacaccgtcaaaagttgttcaattgattcaacagcacaacatcaaatacgttagaatctacgattacaattctcaagtcctcaaagcatttggaaacacaagcattgagctaatgattggagttccaaactctgatcttaacgctttctctcaatcccaatcaaatgtggacacctggcttaagaacagcgtcttaccatactatccaacgaccaagatcacttacattacc

SEQ ID NO: 447 - DNA, 417 bp, Arabidopsis thaliana
aagattgagctaaaggatgcttatagaaaaagtaaagaggatattaagaatgagaaagcttgggtaattgatagtgaaagaactagacttggtaatgaatccaactcacagtctgcaaagtatgttctatctacaagagaagattataaagcgccattagtagcagactcttttcttaataggacttggaggttgatagaccatggtctatctctaccggccattctaccaaggatccaatttataagagctactgccaccagatttctctggtgtatattcaaaattctgttattggagttcaaaaagactgatctctctcattatggtttgtctgaagatacactgatacaagcatgtggaccggttaatgctgctcggtatcttgaatcaaaactacgagaatggagtgatgat

SEQ ID NO: 448 - DNA, 416 bp, Arabidopsis thaliana
tttttttttttttttttttttttttttagaaagtttggaacatgtaagaaaaaacacaacataagatgatgttcataaatctagcaagggatagtatcataaaagatgatgttcaaataacgctggacaagggacttagtggctaatgcccttctttgctttcaatgactcgagtgctttgtttcgcaactcaatttcaagcctctttggatcagattcctccccttttttaatcttaggacgggcctcaacttcaccttctgaagtatcagaaagctcttgtttcttatgcttctcctttccaccacgacgttcttcccttttacgatgtctctcctctcgcctacgtttcttctcctcctttctcgttttcttctcctccttcctcctccttttagcctccttcctatcatcta

SEQ ID NO: 449 - DNA, 416 bp, Arabidopsis thaliana
cagcggccgcccgggcaggtactcaaagacatagagatcacctccagcaaggaaacattcaaggcaggaagatataacaccgccaagattggatcgatctccacaatcaggacatgggttgtctccatgattatgagatgaactaacaatgatgttgtccaagaaagttccagttccagtctcttgaccatcaccacgagtaaaatggttgacttgtccatcacctacatagattccgtgatgagcgtaaatgtaggcttgacgccatgaatagatgtgatcgcctggtttcacatcgtctctggagattttattggaaaggaatcccatcttctccaccgacgaatggagaaccagaaattagggattgcgtcgtcagagagagaaagatcttattttttgtacctcggccgcga

SEQ ID NO: 450 - DNA, 416 bp, Arabidopsis thaliana
tggagaagaaggggagaagatattccggctaggtctcaccgcagatataggtttatctgtcgcaaaagctctcaccggttatctctgcggcagcaccgccattatcgccgatgctgctcattccgtttccgatgtggttctaagtggtgttgctctagtgtcttacagagctgcaaatgttcccaaggacaaagaacatccttatggtcatggtaaatttgaaacgcttggagcacttggcatctctgccatgcttttggctactggctctggtattgcctggcatgctttagaccttttatctattgcactgtccgcagctcctgaggtaattcatagtggacatcatcacggcattgatatgaatcatcccattctcgctttgactgttactattgcttccatttctatcaaag

SEQ ID NO: 451 - DNA, 416 bp, Arabidopsis thaliana
ctgccaaggctattgggtgtactgtggttaatataggaacacaagatatcattgaaggaaggcgtcatcttgtgctcggtgtgatctctcaaatcattaagatacaattgctagcagacctaaacttgaagaaaactccccagctggtggagttggtcggtgatagcaaggatgtggaagagctaatgagtttaccacctgagaagatcttattgagatggatgaattttcagttgagaaaaactgaatacaagaaaaccgtcacaaacttctcttctgatgttaaggatgcggaagcttacactaatctattaaatgtcctggcaccagagcacaagaatccatcacatttagcagttaaaagctcatttgagagagcaaaacttgttctcgaacatgcagacaaaatgggatgt

SEQ ID NO: 452 - DNA, 416 bp, Arabidopsis thaliana
  misc_feature (1)...(416): n = A,T,C or G
gcggccgcgcttgagtatatgtttctctatcaaaacaagctctccggtcagatcccaccgtccatcttctccctccaaaacctaatttctctcgactttagcgataactcgctctcgggagagatccctggctcgtggctcagatgcaaagcttggagattctccatctcttctctaataacttaacaggaaaaattccagaaggagtaacttctttgccacgtctaaaagttcttcagctttggtcaaacagattttccggtggaattccggcaaatcttgggaaacataacaatctcactgttcttgatctttctaccaacaatctcaccggaaaactccctgacactctttgtgattctgnnnatctcactaagctcatcctcttctctaactctctagacagccaaatccca

SEQ ID NO: 453 - DNA, 416 bp, Arabidopsis thaliana
agaatcggagaagaagatgggaacggcggtgggacagtggctagaggaagcgcttgttgacctctgccgcaaaccagagaccggtttgaatttcgatcgtgatgtcatctccggtttagtctcctattgcgatcttgctcagcctgtcgatgccaaggaatatctcgacaatattattggaaaagaaggcaaaagcatcattgcagaatatctacagcgaagaggatacaaagatccatctaaccatgtagcagccagttcaggtccagaactgcaaatgtatgttaagccaaaagtggataatggtgcttctagtggaaccaagaaaccgtttaaaacaccaaaagagggaacatcttctaatcagcaagctggaactgggaaattaacagctcccgcccagcaagttaatccta

SEQ ID NO: 454 - DNA, 416 bp, Arabidopsis thaliana
  misc_feature (1)...(416): n = A,T,C or G
ccacgcgtccggagattgtaagaaaggctaaacagcctccagtgcttcacggtgttcctgattttgctgaagtttataatttcattgggagtgtctttgatcctgaaacgagaggccatgtggaaaagctcaaggaaatggatcctataaatttcgaaactgttctgttattgatgagaaacctcacagttaacttatcaaaccctgatttagaatccacttcggattgtaatgatgctgcagaggaaagtcctcttatcatatgacaacgtgacgaccgagctcccaagcgttnnntcccttgtcaaganctcaacnngcgacaaatcagcataacaaaaatatgagccatcagctagcaagtttactcattggtttcccatgtttaataaactttggtgttatacgtcactgga

SEQ ID NO: 455 - DNA, 416 bp, Arabidopsis thaliana
taagttccaaattatcatttgcatgagagagtaaatcaaacagtaaataaaaacagagaatacattccttctttgtccctaaatcaaagtaataacaaacttataaaacgattaaaatggtgcaagtaaaacataacattttcaggtgactttttatgatttgttccttttcaagaatcagtgtccattggctacagatccatcttcacctttcttgccatagaatctccggtacaaggaatcaacctctttcagataataagttcccggtgccaaaagatctataataccctccttggttgtcacaaagtcctttgctccatactatgttccattagcttcattgtctccacaaacttctcaggtgcatactcatgtctagctttcaatttaccgccaacatccattacagatgc

SEQ ID NO: 456 - DNA, 416 bp, Arabidopsis thaliana
tcgagcggccgcccgggcaggtactcttcgactcgcttgttcccaacacattccttcacaccagctaaattcggattctgagaaagtttgaagatggcacgaggcggtatatcttgccctgttcgaccaggcacattgtatataatcgtcggtcccatatgaagaacagactggaaatgtgcaatcagtccctcaatagaagtcttgccatagtaagggtttatatgaagagcagcatgcattccaaccgcgaatccttgttcagtcgcgtggattgcttctctagtcgaattgcttccagtgtttccaatgactttgatgcttccgccaaaacagttaacggtatggcctataagcataatgtgttcgtcccagctcatcagttgtccttcaccagttgtacctcggccgcgacc

SEQ ID NO: 457 - DNA, 416 bp, Arabidopsis thaliana
ataagactcctcatgtgtctgtgtgtggtgatgtcaagctggctttgcaagggatgaataaggttcttgagaaccgagctgaggagcttaagcttgattttggagtttggaggaatgagttgaacgtacagaaacagaagtttccgttgagctttaagacgtttggggaagctattcctccacagtatgcgattaaggtccttgatgagttgactgatggaaaagccattataagtactggtgtcgggcaacatcaaatgtgggcggcgcagttctacaattacaagaagccaaggcagtggctatcatcaggaggccttggagctatgggttttggacttcctgctgccattggagcgtctgttgctaaccctgatgcaatagttgtggatattgacggagatggaagctttata

SEQ ID NO: 458 - DNA, 416 bp, Arabidopsis thaliana
gaaaaagaggatgaatcgaaatatagccgctacaccaaaactaggcgcaaagaaccaaccagattgacctagtggataaattaggaagacagaaacaaaaacagcaatgggaccagagaatgcgattgcattataaggtcgcaattgaacagatcgagcaagttcaaattgacgtaacataaaacctattaatgcgaaagcgccgtggagagcaacaaaagcccatagaccacctaattgacaccaacgagtaaaatctccttgtgcttcaggaccccacagtaacaacaaagaatgcgctaaactattagcaggagtagaaactgcagcggttaaaaaattgcaaccttctaaataggaactggccaatccatgagtataccatgaagttacaaaggttgtacctgcccgggcgg

SEQ ID NO: 459 - DNA, 416 bp, Arabidopsis thaliana
tactatcatacagtaatatattaacaatgtcaatggttgataatttgatcaacactagaatacagattaagctgttgctgcttaaagtacaaatcttattgcatcatcaggttcaagtacacatcttatttcttcatatccaaagaccacctgttcgtacaaggtggtttggtctcatacactttactgcttcgtgcttgcttacagttacatgaattttttcttgaaaacctccacaatctccttaggatccattttcgtctgtgcatagccatcgctcttgttaatttcctcaatccatgctgatagtttgggacgttcggcagtaatgtcgcacttaaataattcattgagtacagtttggaacctttcaatgaacgggatataggcgatatcaaccaagcttaactgaccga

SEQ ID NO: 460 - DNA, 416 bp, Arabidopsis thaliana
ccacgcgtccgcttccctcctctcgaaggtcctgggtcggtcgacagtttagaaatttaagagtgagttggtcacatcaatggctttgtctaccgactaaaccccatagtattacaactcttgtttagtttctcttttaagtccatcgataaatggagcacggaatttttgggtgcaaggttgagactttaaggtattagtgtagtaacatttggaattttcttaacttgcaatgtggcctcacaaatagagccggtcctgagaaatcaggtggccaaacaaaattattttatttttagaagtgtttaagatatattttttttaaagagagttaatgttaaagtttcagaaatttaggaccttgttcaatatggcctgctcgtaaacggcattctcataaaaaaaaaaaaaaaaag

SEQ ID NO: 461 - DNA, 416 bp, Arabidopsis thaliana
agtttaaaaactataaaatcactcgacaataatttttttacattcaagctaacaaatttatctataacaatataatatttatacagtcacacttgacaaaatcaaccgaccaaatttaccgtcatttcgcaaggacgacgtacaaaagattcggaaccttttctaaagtttttttatatctccaagaagcaaccagcttgaacgtggccttcatatttatcatgtgtttccagttttaaccatcgagaattgctcatatcccaattataccctacacttggttcgccgtaccgagccgaaccgatcacaaccaggtttccagacctccttatcgccacgtaagatacattgcacacgtcagcaggtagattcccaactttataccacgtgtcatctttcatcatcatcagatcacg

SEQ ID NO: 462 - DNA, 416 bp, Arabidopsis thaliana
caaagcaaaaaaaactcaaaacgtttttgaagataatgatgatgatgaagaagatgtttgttcagatcgctgtggtttgtctattggcgacgatggccgttgtgtccgcccacgagggtcaccaccaccatgctccggctccagcaccaggacccgcatctagctcaaccgttgtttctgccaccaatatgttcaccatcttggctattgctgccgtggctctcgtcgttggttccaaccactaagttggttattacattcgtcgttttgtttcagtttctatgaaattgttctcttgacttttaatatattttgaatttttctcatttgtttttaactctctctatgttgatctgatttcttgaataaaataaaagtttattgaacgtgtgtttttaattacaaaaaaaaaaaaa

SEQ ID NO: 463 - DNA, 416 bp, Arabidopsis thaliana
  misc_feature (1)...(416): n = A,T,C or G
gcggccgcctgggtcatggttttgtctgcttttcgtcttttgcttttgtctggatgattcataatctctcgagatctattatgttcacaagagttgttcttatgcgtggtgagatgatcttaggagtgtttcactatctttcttcaattcgggtttttagtttctgagatctgtttttgaagaatctgatctgagtttgaggaagtttgactaaatagatcgaagaagatgtttaagcagatacttgnnnngcttcctaagaaaacttctgctaagttttgggataatggtgaatcccaaactctagataacaacaacaatcaaggaggaggtgatgaagttttaagccagagaacgtcatcaaatggagatactagtttggattgtgtttcttcttttgatgtattgccaaggtt

SEQ ID NO: 464 - DNA, 416 bp, Arabidopsis thaliana
gcggccgcggagaattcttttttttttttttctttccgatgcctccgaccaataattaccgaatctccggcgaaccaccgtctactacgccgtctcatccaccgccaaaaccgaaaacaaggattctctctctattcctcgttggtgtaatcatgttttcaatcttctttctcttcctcgttcttatcggtatcgcctctgttcttatcctccctctcctcctctcttctctccatcgtcaccaccgacgtcgtcgtcgtaatcgccgacaagaatcctcagatgggttatcttcaagattcgtgaaaaagcttcctcaattcaaattctccgaacctagcacatacacacggtacgagagcgattgtgtggtttgttttgatggattcagacaaggacaatggtgtcggaatctt

SEQ ID NO: 465 - DNA, 416 bp, Arabidopsis thaliana
cgcccttttttttttttttttctaaattagtttaggaacttgagactttaaaatctcaaacttctctttggtagcaacattttcaaatgagtaaacatgtttattgtagacataacataatagtaagcatttatgtataatgcatccatcaagtagtagatgatacaatggcgtaaagagggaataaacggtgaatcaccataccggttgattcagcgacattggtttgatcttctatatattcctccggtaatctccaatcataccgatgcactaagttagccaaagtcacctcaatcaagatcacagcgaatgatattgctggacaaatccttctccctgctccaaatggaatcagctcaatattgtgacctcggaaatcaacagacgaatctaaatgtctctccggtctaaac

SEQ ID NO: 466 - DNA, 416 bp, Arabidopsis thaliana
accatggaagctgagaaagaaacagaacaagaaggaaacttgacagtaatgaaacttccggtgttaccaactaaacccaacactcacagccactctatgtcatcaccaattcacagttccatatcagcttcagttccctttagctgggaagaagagcctggcaagcccaagcaacactctacttcttcttcctcctcttcctcttcctcaccattaacttcttattcttcatctccttttgaaactcacaagtccttagagctaccaccaaggcttcacttacttgaaaaagatggaggatcagtaaccaaacttcactcgcctataacagtctttgatggaccttatagcatgacgacatcaaaaaggatggattcaccttcctttaggatgatggtgaaaggtagtgctgattg

SEQ ID NO: 467 - DNA, 416 bp, Arabidopsis thaliana
  misc_feature (1)...(416): n = A,T,C or G
atgggccaacaatttaaagtgggataaatatgctggaaataaagaaattgttgatggattggccgctttgagacaaaaaatcacagctttggacggcgctgaaggaggctctggtggcaatcaaagagttaaattagtagttgtcggtgatggtgccgtcggcaaaacatctctgttgatttcattcgctgaaaacaaattccctgaggattannnnnctacagtcttcgaaaactacacttttaaaatcactcgcgacgatggtacacttgttctgttgcatttgtgggatacagccggtcaagaggactacnaccgattgagacctttgagttatcctggcgctgatgtcatcctgctctgtttctccaccgtcactgcctcgtcattcgcctccattaaagaaaagtggtacc

SEQ ID NO: 468 - DNA, 416 bp, Arabidopsis thaliana
acaacgatgctgcttcgaatttctggtaacaatctgagacctttgagaccacaatttctcgctcttcgaagctcttggttatcaacttcgccggagcaatctactcaaccacaaatgcctccgagagtaccaaatcttattggaggttcttttgttgagtctcaatcatcttcgtttatcgatgttataaaccctgctacacaagaggttgtatctaaagttccattgactactaatgaagagtttaaagctgcggtatccgctgcgaagcaagcgtttccgttgtggagaaacacgccgattactacccggcagcgtgttatgctaaagtttcaagagcttatacgcaagaatatggataaacttgctatgaacatcacaaccgagcaagggaagactttaaaggattcacatgg

SEQ ID NO: 469 - DNA, 416 bp, Arabidopsis thaliana
ctctcatctccgtgatggtgctctcccacgccgtatcggagtcggacgtctccgtccactccacattcgcatcacgttacgtccgtacttcacttcctaggttcaagatgccggaaaactcgattcctaaggaagcggcgtatcagatcatcaacgacgagctgatgcttgacgggaatccacggttgaacttagcctcctttgtgacgacatggatggagcctgagtgtgataaactcatcatgtcctccatcaacaagaactatgttgacatggacgagtaccccgtcaccaccgaacttcagaaccgatgtgtgaacatgattgcacatctattcaatgcaccgttagaagaggcggagaccgccgtcggagtaggaaccgttggatcatcggaggccataatgttggccggt

SEQ ID NO: 470 - DNA, 416 bp, Arabidopsis thaliana
ttctaccagttgttggactcgtggatcctgatagtttgaaacctggtgacttggttggagttaacaaagatagctacttgattttggataccttgccatccgagtatgactctagggttaaagccatggaggtcgatgaaaaaccaactgaagattacaatgacattggaggactagagaagcagatccaagagcttgtagaggcaattgtgcttcccatgacgcacaaggaacgttttgagaagctgggtgttcgtccaccaaagggagtgctcttgtatggtcccccagggactggtaaaactttaatggctcgtgcctgcgcagcacagaccaatgccaccttccttaaattggcaggccctcaattggtccagatgttcattggagacggagcaaagcttgtccgtgatgcc

SEQ ID NO: 471 - DNA, 416 bp, Arabidopsis thaliana
cttgaaggcaaaatggatcttaagattagagctcttgagttagtcgaagagatgaggaccaagagagctgaccaacaggcggtgttgctgttggaagccttcaacaaagatagagcatccttgccacagcccgttccagctcaaccaccatcttccgaattacctccaccggatcctcgcactcaagaaatgataaatgagaaactgaagaaggcagaagatcttggtgaacaaggaatggttgatgaagcccagaaagccctggaagaggctgaagctcttaagaagcttacagttagacgagaacctccagcagattcaacgaagtacaccgctgttgatgtgcgcatcacagaccaaaagttgcgtctatgtgacatatgtggagcattcttgagcgtctatgacagtgatcg

SEQ ID NO: 472 - DNA, 416 bp, Arabidopsis thaliana
gagcaggaaagatgttggatatcaatctatttcgtgaagagaaaggtaacaatccggagattatccgagaatcgcaacgccggagatttgccagcgttgaaatcgtcgatgagatcattaagctggacaaggaatggcgtcagcgtcaatttgaagttgatagcttcagaaaggagttcaacaagctcaataagcaagtggcgcagctcaaaattaaaaaagaagatgcgagtgagattattcaacaaactgagaaaaacaaacaagattctactgcaaaggaggctgaagttcgtgaagcttatgctgctttgaaagccaagttggagcaagttggtaatttggtccatgattctgttccagttgataaggacgaggctaataatcttgtgattaaactgtggggtgaaaagcgg

SEQ ID NO: 473 - DNA, 415 bp, Arabidopsis thaliana
gtggtctcagttctacaacaataaccaaacctcttcacaacttctaccaccgcttcaaccgctgttacaaccaccactgccggtgataccacctccatagactctcgtctgagtccagaaactggccgtgtaaccaagccaacacgtagaaggtccagagcctcacgtagaacaccaacaacgcttctcaacaccgacacttccaacttccgtgccatggttcagcaatacactggcggtccatccgctatggctttcgggtccggtaatactacttctgcttttagcctcacttcatcgtcggatccatcagctggatcttctcaacaagctccttggcaatataatttccagcctcacgcgccgcttcagccaccgcaacggccttacatgttttctttgaacaacgtgaatc

SEQ ID NO: 474 - DNA, 415 bp, Arabidopsis thaliana
gagacagaaacacaaaacttatgttttatcactcaaactacataatcagatttttcagtctgaaacaaagttaaaaacaacatgggactcactttcaagtgaacatgaatcacagcattcgtatatagagataacaaattaaactataagagttacttcattcggttgagatattaccatattgccaaggattaaactcgatcgatttgaggtccgtttcgttggaggcactacttgagctctctgccgtgtctcggtgttcattgtacttcccgttgtattggtatacttcaatatctccccatggagtaggtgtgatctcatccgttagatcgaaccatcttggagtgaacttttgtccctttgtctctctggtcctcttttcggccctttgtctctcctcaaggctgtgttt

SEQ ID NO: 475 - DNA, 415 bp, Arabidopsis thaliana
tgtgggttaaaagtgaaaactcatcctctgtattttcaaactcttatctctacgtgtgcacaaacctcaccattagatgataagtagaagacaaaacttacagccaaataggcaaacttatctctctctccaaaacatttggtccatacgataaagcaagaagaagaattaagaattagagcaagaagaagaagaagtagaggatgaagcatgaaatgatgaacatcaagctaagatgcataaccatcttctttcttctttttgctttgcttcttggaaattatgtagctcaagcctcaagacctcgttctatcgaaaatacggtctcccttctctcacaagtacatctcctgaattcaaggaggaggcatatgatagggtcgacagcaccaacttgtacgtacaacgagtgcag

SEQ ID NO: 476 - DNA, 415 bp, Arabidopsis thaliana
  misc_feature (1)...(415): n = A,T,C or G
gcaagtaacaaaaatggctatctcaaagcttattcctactcttgtgctctttgttttgttctcttttgatgttagtgttgctcatccaggtctaggatttggatggggaagtaatagtcccattggaggatctttttactcaaatctttacccacaattttaccagttctcttgtccacaagctgatgagattgttatgacggtgctcgaaaaagccatagctaaagaaccaagaatggcagcatctttactcnnncttcacttccacgactgcttcgttcagggctgtgatgcatcaatcttgttggatgatagtgcaaccatannnagtgaaaagaatgctggaccaaacaagaactccgttagagggtttcaagtaatcgacgagatcaaagccaaacttgagcaagcttgt

SEQ ID NO: 477 - DNA, 415 bp, Arabidopsis thaliana
ccacgcgtccgaaaccctaaatctcaatcctcgacgctctctactaagaaactcaatcttactttctctgtaattcgtagcttccgaaatcttttctcaagaatctcataaccatggcgaatcctgctccgaatctagaatgtcgtatgtacgaatcgagataccctgatgtagacatggcggtgatgattcaggtgaagaccatcgctgacatgggagcttacgtatctctccttgaatacaacaacatcgaaggaatgatcctgttctccgagctctctcgccgtcggattcgtagtatcagtagcttaatcaaggtcggtcgtaccgagcctgttatggtccttcgtgtcgatagagagagaggttacattgatctcagtaaacgtagggttagtgatgaggacaaagaggc

SEQ ID NO: 478 - DNA, 415 bp, Arabidopsis thaliana
atctcaaaggacacacacggttacgtcggtgctgatcttgcagctttgtgcacagaggccgccctgcaatgcatcagggagaagatggatgtgattgatctggaagatgactccatagacgctgaaatcctcaattccatggcagtcactaatgaacatttccacactgctctcgggaacagcaacccatctgcacttcgtgaaactgttgtggaggttcccaacgtctcttggaatgatattggaggtcttgagaatgtcaagagagagctccaggagactgttcaatacccagtcgagcacccagagaagtttgagaaattcgggatgtctccatcaaagggagtccttttctacggtcctcctggatgtgggaaaacccttttggccaaagctattgccaacgagtgccaag

SEQ ID NO: 479 - DNA, 415 bp, Arabidopsis thaliana
tcaaaagtttcgttgaaggtgggattgcctctgtaatcgccggttgctctactcaccctctcgatctaatcaaggttcgtcttcagcttcacggtgaagcaccttccaccaccaccgtcactctcctccgtccagctctcgctttccccaattcttctcctgcagctttcctggaaacgacttcttcagtccccaaagtaggaccgatctcactcggaatcaacatagtcaaatcggaaggcgccgccgcgttattctcaggagtctccgctacacttctccgtcagacgttatattccaccaccaggatgggtctatacgaagtgcttaagaacaaatggactgatcctgagtcagggaagttgaatctgagtaggaagatcggtgcagggctagtcgctggtggaatcggagc

SEQ ID NO: 480 - DNA, 415 bp, Arabidopsis thaliana
ccacgcgtccgcgaacttcaagttcaaagagcttaggggggaagactaagggatcgagttctaaagccagcagctccgattcaagccattggccttgtgaatattgcacttacgtaaatccaaggtcgaccaccatttgccaaatgtgtgaacatggccggtgaaatgccagaaactggcattaaagactgtaatagtaatgcttcgtcgcttttggtcataattatgatcaagtgtcgtgtaactttgtatgtttctcgtattagaataaacgggtccaataaattggattagattggccattattattgatttgccaatgaccaaaaagtgaaaacatgagaggtgagttatatataagttcttacaaaataattgtaaaacttctgtaagtttttttctaatcttttgtcca

SEQ ID NO: 481 - DNA, 415 bp, Arabidopsis thaliana
tcgagcggccgcccgggcaggtagagtttattaagaaggctggtgttgatcacaagattaattttatccattccgatggtcttaaggccttagaccaattggtgaacgacaaatgtgagtttgattttgcatttgcggatgctgacaaatcaagctacgtcaacttccatgagaggcttctaaaattggtgaaggttgggggaatcattgcgttcgacaacaccttgtggtttggttttgtggcggaggatgaagatggagttccggagcatatgagagaatatagagcagctcttatagaattcaataagaaattggctttggatccccgagtcgaggtctctcagatttccattggagatggtatcacgctctgtagacgtcttgtttgatcaaaagactacttgaagagtac

SEQ ID NO: 482 - DNA, 415 bp, Arabidopsis thaliana
cttgcagccggcggaacggaggaacaaaaagcagagaagctaatcaatcatgggaaaggttcacggatctttggctcgtgccggtaaggttagaggacaaactccaaaggttgcgaagcaagataagaaaaagaagcccagaggtcgtgctcacaagcgtctgcagcacaaccgtcgttttgtcaccgcagttgttggtttcggaaagaagagaggacccaactcttctgagaaatagaagaagttagagagaaagatgttgtcgtgaaacttctcaaggtcatttgtaactttttgttttctttggcaccgaactattatgttttgattctatgctatgaaatactgttttttcacttatgattttggtcaattaaacataagatatgatttttgccaaaaaaaaaaaaaaaaa

SEQ ID NO: 483 - DNA, 415 bp, Arabidopsis thaliana
catcatcattacaagaaacctcattgtgctgtcagaaaatataaagaatcaaacccaaaccaacccatgagagaaatataaatgagccaagtaaataaaattgaagaagagaaacaaaaaaacacactcttcaaaccaacaacaaattgactgacccacataaaaccaaactagaacaagtcgaacttcttcttaagcagatcttgcttccaacgtggtaagttgttgaatgcttctttctcgatcccaaacacactttggaactcttcctcagatagataagcctctctgcgtttgaaatcgattccagtcactgggttctcagatttagctctcagctgttcataggtgaaagttgctccacttggttgtatttcagaatcaccttgctcttctgtttcctgctttgcttctg

SEQ ID NO: 484 - DNA, 415 bp, Arabidopsis thaliana
taaactcaaatcatgtaataataatcaaatgaaaacaacaacaaagagtgttgagtctaatacatacacattacattaaaactattgttcagattccaaatttcttcttcttctccaatattacaaactacaaagagagagagagaatggtaataagagaagaaaaacagtacaagagaatcatcatcttgacaaatcttcaaatatctaaatcctccaactgaatgttgctcttaagaggcacataatctccaagatacccaccaagttgatcatacaaagcggtcttatcaatagtctgatgatgataactcttacaaacatagtaaaacacactctgaaccaacaaacccacaagattaaccatcacaagaacaccaactaacaatccaccaaccaaagtcctagtaaaagt

SEQ ID NO: 485 - DNA, 415 bp, Arabidopsis thaliana
ttttttttttttttctgagaaaacgttaactagtctctaatagacaccaacagcacagccaaggttcatgtcttcatgagatacaacaagcaaaccaaactaagataggagttaccatcaaagattcttcatggatctgaaaagccataacggatcaaatgattgccaaaagaagacgatcctacagattatttggtgagacaagaaaggcgctaaccgggaaaagttttgttcaagcgttgatggcatctgattctttagaccttatgatcttggcttgtagtttctgcataaaagctggattggcacggagtctttgttttacatatgaagttcttatgtcttcagcgatcttgttggctttcccagcttcttctatcaacccgtaaagagttcttaagcagtctttcctgtt

SEQ ID NO: 486 - DNA, 415 bp, Arabidopsis thaliana
cgcccttttttttttttttttttggtgatttacgtgactctacgaatgtcaatatacttaatcgagcaatccatgatcattacacaacacgaaacgatcagaacgcatgtattaatatactggccgacgcattatatgatgtattttgcgacaaagaaggcggacttgcaaaggcatgtttcgcatacttagcaaaaggcggcttctttagccgaggccctgtgcagctactgagcggtgtaagcaggtcacaaaccttattgctcttccatttcttcagcgttgcactgtatgctgtgtactacatgctgtccccattcccaactccatcacgcatatacacatgcgtcatgtcatttcgcaaagcagtaggcatcatcataccacgcgtggcacgcgagaacgactcatggtg

SEQ ID NO: 487 - DNA, 415 bp, Arabidopsis thaliana
cctctagagcggccgccctttttttttttttttttttttttttttttttttttttttttttttttggagagaaagaaaaaagcttgcatatcattcaagatggaatttcaatgtttttggcctaaagccaaaatcaaaaatacaagtagtctgtgtgtaaactcttattattagaaaagcaacaaaagataactagagagtttcagccctctcttcaaaaactgataaggctctcaattcttctactccactacttcaatcagggtgggctcatagtcagagggagccacaaatccatggaggttcatcactgttgcagctacatttgcaagccccggtgtttccagatctttacggaatctcactccttgagccaaaccaggacctccaatagcaattggcactggcttgagtg

SEQ ID NO: 488 - DNA, 415 bp, Arabidopsis thaliana
cctctagagcggccgcccttttttttttttttttttcagataaacgaatattataagctgtgttttaactttgagcattacatgggaagagaacaatttaaataaaatttggagcaacatatcaagaacggttttggttcaaccgggtttgaaaatgtacatgtggctttggaattacctggtgcttgagtttccaagagtgagttcaagatcatctgaaccactctcctcgtgtatcctctctccttcccatgctttcactagcccgtttgtattactcccaaaagcaaactctggaggagccacggcttcagacattggaacatctgctgtctggtcagcaccaggaggaatagcaggggagcaggttccgctttgacctggtgtccacatccttgaccctcctccgcctcca

SEQ ID NO: 489 - DNA, 415 bp, Arabidopsis thaliana
ttttttttttcacacaagtgaccgtgtattttattgcacaagacttgaactcgttactcgtcacacgctgcagcacactcaatgacctcattgtcatcgttgcacacgttcacactgctactcatacacgatggtggtgacgctgctctgactctgaatctgactcggtccagccctcatccctgccccctgtccaactcgccacaaccaccgctggcctcacctcttcctcctccatcctctccttcctctcctccctctccctccacggatgacgtcgcatgccgtaataggactgtgtggagtaggactgagtggagcaggaagaaggcttagcatggaaatgctcgatttctgcacggagacgagcgagggcgtcgagtgaggaggaggaggaggaggaggaggaggagga

SEQ ID NO: 490 - DNA, 415 bp, Arabidopsis thaliana
gagggtgatatggagtatgataaaggagaaacttattcttccttatctggatttggacattaagtacttcgacttggggattctgaatcgcgatgctactgatgacaaggttacagttgaaagtgcagaagcagctcttaagtacaatgttgctatcaaatgtgccactataactcctgatgagggtagagtgaaggagtttggactgaaatcaatgtggaggagtcctaatgggacgatcagaaacattctagatggaaccgtattccgtgaacctattatgtgcagcaatatcccccggcttgttcctggttgggaaaagcctatatgcattggtagacatgcctttggtgaccagtatcgtgccactgatacagtaattaaagggccaggaaagttgaaaatggtttttgtc

SEQ ID NO: 491 - DNA, 415 bp, Arabidopsis thaliana
tttccaatctccttccaaacccatttcctatttccaacccaaatccaatccatcgccgccgttattcgccaaagtctccgtctttcgatgcagagcttccgtacaaaccctcgtcgccgttgagccggagccagttttcgtctccgtcaagacttttgcgccagccaccgtcgctaatttaggaccagggtttgatttcttaggatgcgccgtcgatggtctcggagaccatgtgactctccgtgtagatccctctgtacgagccggtgaggtctcaatctcggagatcaccggaacgacaacaaaactcagcacaaatcctctccggaactgcgccggaatcgctgctattgctacaatgaagatgttagggatcagatcggttggtttatcattagatttgcataaaggtctt

SEQ ID NO: 492 - DNA, 415 bp, Arabidopsis thaliana
ctgttgaagaaagcttaaacctttctgggtttcttttaactatggcgacaagggttagtttcttcttagctctggtaatgacggtggtgattcttgctccttctgtcgtctctggagaaaatgggttttccgatcttaaaatccgtactcacttgaaacgactcaacaagccagctctcaaatcgattaagagcccagatggagatatgattgactgtgttccaatcactgaccaaccagcttttgctcatcctctgctcattaatcacactgtccagatgtggccaagtttgaacccagaaagtgtatttagtgagagtaaagtttcatcaaaaaccaagaatcagcagtctaatgctatacatcagctttggcatgtgaatgggaaatgtccaaagaacacaattcccatcag

SEQ ID NO: 493 - DNA, 415 bp, Arabidopsis thaliana
cactaggagaagaaccacaagtagcagaagactgcatgggtttgcttcaactcctaagcaacggtaccgttttgagatccgagagcattgaccttattacccaacaaatcccattcaaaaacaaccaaaccgttctcttcaaagactcaatctatcacaaacctaacaaccttcacctccgtctctacaaacccatttccgcctccaaccgtaccgctctccctgtcgtggtcttcttccacggcgggggcttctgcttcgggtcacgttcttggcctcactttcacaacttctgtctaactcttgcatcgtcccttaacgcccttgtcgtctcacctgactaccggttagcacccgaacaccgcctcccggctgcctttgaggatgctgaggcggtgcttacatggctctggga

SEQ ID NO: 494 - DNA, 415 bp, Arabidopsis thaliana
cagccttgatggtggtggagtcagaggaatcatcgccggagaactcgatggagaagaggcgaggcttgcggattacttcgacgtgatagctggaactagcaccggtggtcttgtgacggcgatgttgactgtaccggacgagaccggtcgacctcatttcgcggctaaagacattgtgccgttttaccttgaacattgtcccaagatatttccccagcccacaggcgtgcttgctctgttaccgaagcttccaaagcttctgtctggtccaaagtacagcggaaagtatctgcgaaatcttctgagtaagcttcttggagagacaagacttcaccagaccctcacaaacattgttatacctaccttcgatatcaagaaacttcaacccactattttctcctcttaccagctgttg

SEQ ID NO: 495 - DNA, 415 bp, Arabidopsis thaliana
aacgatcggggaaattcgagctcggtacctcgagcggccgcccgggcaggtacaacatggtcctgcacaagtttggtgagaagctatatactgggtttattgctactatgacttctcatctcaaagaaaaatccaagcttatcgaggcagctcagggagggtcgtttctagaagagcttaataagaaatggaatgagcacaacaaagcgttagagatgattcgagacattctcatgtatatggataggacttatattgagagcaccaaaaagactcatgttcatccgatggggcttaacttgtggagggataatgttgtgcatttcactaagatacatacaaggcttctaaacactcttcttgatctagtgcagaaggaacggataggtgaagttattgatagggggttgatgag

SEQ ID NO: 496 - DNA, 414 bp, Arabidopsis thaliana
cttatcaatatgaatataggtcaagcaaagtgccacgactcaagttggaataaccaaagttgcaggaaaatatcaaacaaattttttttgtaactaacaatgagcctacaattgaagttctcactatttttttgactaatgacttttcaacttttcttccacgagctcgatgcatcgatatagaaccaattcaattgggttcagaagccctacatcgtcgagtgaagattcttggccatgatcctccttgaggttctcagcgatgctgcagctcacaagagttcgaagaggcagaagccattccttatacgctttctccagattcttctttgacaaaatatcactgccgactttgcttctctctttacctgcttcacattctctcgattcaaataacagtgcaaacctgtagag

SEQ ID NO: 497 - DNA, 414 bp, Arabidopsis thaliana
gttcagatcggagctgatttcgaatttggatgtgaaattgagattctagggatttcaaattttgacgatcatggcgacgaggaatcgtacgttgctgtttaggaagtacagaaactctctgagaagcgtcagagctccattgtcgtcatcttcattgacgggaacacgatccggcggcgttggtccggtgatcgagatggcgagtacttcgttattgaatccgaatcgctcttacgctcctattagtaccgaagatcctggaacttctagtaaaggtgcgataacagtgggcttaccaccagcttgggttgatgtctctgaggagatatctgtgaatatacagcgtgcaaggactaaaatggctgagttgggaaaggctcatgccaaggcgttaatgccatcgtttggggatgg

SEQ ID NO: 498 - DNA, 414 bp, Arabidopsis thaliana
cacgttctcaaacaaaaacttcaaagagagagagagagagagttttgtgaactcaagaaaataaaaaaagttatagttaatgggattcggcttagagagtatcaaatcaatctccggcggatggggcgcggcggcgcgttcctgtgacgcttgtaaatcagttaccgccgccgtgttctgtcgagttgactcagctttcttatgcatagcatgtgacacaagaatccattccttcactcgccacgagcgcgtgtgggtttgtgaagtttgtgaacaagctcccgccgccgtcacttgcaaagccgacgccgccgctctttgcgtcagttgtgatgccgatattcactctgctaatcctctcgctagccgtcacgaacgtgtccccgtcgaaactttcttcgactcagccgaaac

SEQ ID NO: 499 - DNA, 414 bp, Arabidopsis thaliana
atcttcttttatatatcacataagaaaagtgtgtttacgaaacgaaagaccatcaaatatgtctccccttatctctaatacatttgcttatataactaaacctatctatcaccaattatgtggttgcagcacacaccagagaacaccgaatctcttaaaccatattacatcaatttctgctcactatgcagagagctacaaatctaagaataaaaacaaaaagtctccttttaagttacaatcacaacccaaaggaagaaatatcgggttctcattgttgcggccacggtcagctagccgcaacaggatcggttatcggacttgcatttaacagttgatgctgcacagttttgctacctgatacagagttgttcttatcaactcgagagatcaggttctctgttttccctgttg

SEQ ID NO: 500 - DNA, 414 bp, Arabidopsis thaliana
  misc_feature (1)...(414): n = A,T,C or G
gcggccgcctccatcttagtgttagcctctcttcttctaatcagttcatctcttgcttcggctactatatcagatgcttttggtagtggcgcggtagctccggcaccgcagagcaaagatggaccggcgttagagaaatggtgtggacagaaatgtgaagggagatncaaagaagcggggatgaaagatcggtgtttgaagtattgtgggatatgttgcaaagactgnnngtgtgttccttcaggcacttatgggaataagcatgaatgtgcttgctatcgtgacaagctcagtagcaaaggcactcctaaatgtccttgattctatttctttccaaccaaaaatttaaataaatgaataagagagatccagtaaactaatataaaactataaatggatcttttgtttatgatt

SEQ ID NO: 501 - DNA, 414 bp, Arabidopsis thaliana
ttttttttttttttgataaatagataaaacttattaattaaagcagaagcaaaccaaacaaatattttttttattcatgatctcttttctgtttatgggttattatgagattttctcagtcgagaagaagcttcttaagcttacgaaatttgtagtctttgtagacataaggcttaaacttgggaacgttctcatcaccggtaattagctccggcaaaggtccgaagacttgatcaaggctagattccacaaaaaccggccacgagattctcgtcttctccttatccatcttcgccctatgctccacactcttatacttcccattgctcattctcaagaattgatcgccgatgatgacgatgatcccggaagtggtatactccgcgtcgatccattggttatccggacgcgtgg

SEQ ID NO: 502 - DNA, 414 bp, Arabidopsis thaliana
  misc_feature (1)...(414): n = A,T,C or G
gtctttcatcttttggacaatcactcttgtccctcttcttaaatacgttttcatagttcttnnnngatgataatggtgaaggaggcacttttgctctttactcgcttttatgtcgacacgcacgagtcaactcgttaccgagttgtcaattggctgatgagcagcttattgagtataagactgattcaattggttcgtcttcgatgcctcaatctggttttgcagcgagtttgaaatctactcttgagaaacatggagttttgcagaagattttgcttgttcttgctttgattgggacttgtatggttattggtgatggtgttctcacgcctgctatttcagttttttctgcagtatctggtgttgagctttcaatgtctaaggagcatcacaagtatatagaactccctgctg

SEQ ID NO: 503 - DNA, 414 bp, Arabidopsis thaliana
tgatcgaaaattgaaaagattttattcagaaaaggagttgcattttacaggtaaacctcaacaaaactagtcacattttcgtacattattattattactacgtactgtttaacttccttttacagtactcgaggttcattgttaagctgcagttttaagctcttaagctgcagccacccttggccttccgtagctagctgggccactgctgtgagtcaaagtggtctcgagcgtgttgaacttgaccctccttgcttcttcgggtgagatttggaacccattggttatgacttcaagtggtaaacctctcaagactgaggttcgtcccgcgagagtgttgatttgcgcgtttgcgtttgttttgaactcaacccactggaatcggttgcttgttgcgcgtttcaccaccgagaa

SEQ ID NO: 504 - DNA, 414 bp, Arabidopsis thaliana
ttttttttttttttttttttttttttgtctgaaaagactagatagatagatgatatatgacaatggagcaacctaaaaaatgttctcaaaagatgcaagaacatccacacaaaaaaagaagaaggataaaacactcagctcaggggctcgaatccgttttatcctatgttacaacagagattcacacagttcgcaatctgtctagaggagctatgtagatgggtcatagtattagggagattaaagctaaataaaaggcgaagggcaataagaagtaacctggagagatgtttttagagcctttattgtccattagcattgttcttcttgagttcctcgttctcctgacgcagcgcatcgatccttgactggagaatactgatcatagcttctgcactcatcatttcaagcttg

SEQ ID NO: 505 - DNA, 414 bp, Arabidopsis thaliana
  misc_feature (1)...(414): n = A,T,C or G
tcgagcggccgcccgggcaggtcgactttgcaaggccagtggatcaaggtggggcagaaaggaggaacgggaccaggacctagaagttcacacggcatagccgcggtcggagacaagctctacagtttcggcggcgagttaacaccaaacaaacacatcgacaaagacctntacgtctttgacttcaacactcaaacttggtcaatcgctcaacccaaaggagacgccccaactgtatcctgnttaggcgtgcgcatggtggccgtgggaactaagatctatatctttggaggccgcgatgagaaccgcaacttcgaaaactttcgctcctacgatacggtgacatccgagtggacattcctgacgaagcttgatgaggtgggaggacccgaggcttgtacctcggccgcgacc

SEQ ID NO: 506 - DNA, 414 bp, Arabidopsis thaliana
tacctcgagcggccgcccgggcaggtctcaagctcaagttaaaacagaaaaaatgtcaacttcagaaaacactccgtttaatggcgttgcctcatccaccattgttcgagctaccattgtccaagcctccaccgtctacaacgatactcccgccactctagaaaaggcgaacaagtttattgtggaggctgcaagcaagggatcggagctggttgtgttcccggaggcgtttatcggtggttatcctcgaggttttaggtttggtttaggggtcggagttcataacgaagaagggcgtgatgagttccgcaagtaccatgcttctgctattaaagttcctggccctgaagtagaaaagttggcggagttggccgggaagaacaatgtgtacttggtaatgggagcgatagagaa

SEQ ID NO: 507 - DNA, 414 bp, Arabidopsis thaliana
tttttttttttttttgaagcagagcaataagcagttgttcccatttcaaacacaaatctcgtaactcttttgtacaccaaaatgaaagctatgttgcgatctaaacagagtttcgaaaaaagtatcaaacgataacataaatgtgtaaatatctatgcacactcgaaagttaacagagagaagaaccaaaccaaagtactgataattccagacacaagaactcagtcttttgagttaagctgatggagtgtggctctgactgttgatcaatccgtacttctctctgattcgggacctccagttgtcaatattgcttgatccagaagatgtctggtttgcctgtggaccaagaagattgtctcgtgctctactcatcggattctcaaaatcatcttcatcatcaagctctgattg

SEQ ID NO: 508 - DNA, 414 bp, Arabidopsis thaliana
  misc_feature (1)...(414): n = A,T,C or G
acgtcgcatgcacgcgtacgtaagcttggatcctctagagcggccgccctttttnnnnttttttttttttttttttaaaagttaaacttcttttttaatgaaaattaatcgcacttgtatcatcatgtacaatgctaaaagtaatgattgaggatcttaacaaaagaaattgaattttctaacaaatctagacaattgaagcaagtgggtttagtggagccctagactcaaccaatggggttgtcttgtgtctagaatcatcttaactacatcttctacaaatgaatcaaaacaagaatagcaacaccctttcatcaggctactaccactactgctactgctgctgctgccaggtgtcatatgatggtgagtacacgtcactggtggcggaacaagatggacttcactgctctc

SEQ ID NO: 509 - DNA, 414 bp, Arabidopsis thaliana
ttttttttgaagagaaagatagagagacgattgccatttaagaaagaaaccaaacattgaagcagaatacactggaggaacatatactatataatcagagaaggtagatttatttgatatatattagctaatacttgttcactttctctggaacaagcttgagatgctgcgacttgtgcatagcaagaccagtcatgacatccatgttgatatcatctggtttcatcccattagggagtttaaaattgaagctgaggagaaggttcgcataaggaacctcaagcatcgcggccccaagacgcattcccgggcacattctccggcctgacccgaacggtataaactcgtagtccgtgcctttgaagtcaacttccttctcaagaaacctctcgggcctgaactcatcagggttcg

SEQ ID NO: 510 - DNA, 414 bp, Arabidopsis thaliana
ggccgccctttttttttttttttttttttttcaacctcttaaaacatctagaatcagaaaactattcattgaaattcatacagagaatatcagttatcacttatcagctactaaatatcataggaaacacagtaacacacaatagcgtagagattatacaataaatgggcttcaaaagatcagcccaaaaagaaactaagcccaataaataatttctaactaacgtgtggactcggtgagtcatcatctatctcatctcggtgatggcggtgatctcatcgttattattccctccggtgttaacccgacgaacaatcacgatctgctccaactcatcgaaatcaatggcggctaaaaaacaaatcggtgaagaaacctcgaagcgggtctttgtatgcggcggtggagtaatcg

SEQ ID NO: 511 - DNA, 414 bp, Arabidopsis thaliana
aaagttattatagaaaaactgttacataagcaacatatactgaagctgatagacaacatatcatgggacgacatgtcactcccacaaaccaagcaagatcagctcttgtgccaataatggcaaatacaacactaccaacatcacttaaggatggtaaagacttcatattatccgtttggtctctttgctcttcttctatgagtgctaaagaaaaaagttcaaattgtgtcttctgagttccctcaaagcgtaggacgtctttagggtgtatgcaccttccaactggtcacccttcttcgccatggccatgtagaacccgaaacaaaaatctacatggcttgcgttttggatgcaccactgtttgatccaggcaacaaccttctccctcgtgtccaagctcttgagatgggtcgt

SEQ ID NO: 512 - DNA, 414 bp, Arabidopsis thaliana
agaacgaacactctcgagacggaatcgatggcgaattctcagacggtgatggctatgatcaggttggctagacctcctttccgcaacaatcacgataaggttgctttcgctattcactcttctttcgtcgcttccggttatatcctcaccgccaccggacggcctgctttcgccgacgaggctctctcttcgtcttctcagaatgatgttggaatcgaaggatggaacgaattcgagggagagtatgcgtttgtctatgcgaatccgaagaaagggtcaaagaaaattctggttaagtgtttggcgatggatgataaacttcttgttgatgccatagctgatggtggagcagaacctgctcatcttgagattaaagttggggattatgctgaggaaagcaatgagggggattac

SEQ ID NO: 513 - DNA, 414 bp, Arabidopsis thaliana
ttcctctcacttccatacaacatttgaaacctcagctatgcctaaatcaaagcgagatagaccagtgactttgtctaagacgaagaagaaaggaagagagcataaggagtgtattgtgaatggaattagggaggctgttgaaaaatattcctctgtctatgttttctcttttgaaaacatgagaaatatcaaattcaaggagtttaggcagcagtttaggcacaatggaaagttcttcctaggttcgaacaaagtgatgcaggttgctcttggtcgttctgcagaagatgaactccgttctggtatctacaaagtctccaagctgcttcgtggtgatactggacttcttgttactgatatgccaaaggaagaagtcgaaagcttatttaacgcttatgaggattccgacttttc

SEQ ID NO: 514 - DNA, 414 bp, Arabidopsis thaliana
cttcttaagaaggattgtcttgaagaaggaggtgatgatatcgattttgaccgcagacaactaagttcatccgatgagtctaactctgattggtataggtctgatgatgcaatcatgaaaccattatcccagtttggagatgatgatttcgttgttggtagctgggagaccaaagagattataagccgtgatgggctgatgaaactcacggctcgagtatttctcgcatcaattgatcagagaagcgagagagctgctggagaaagcgcctgcacagctctagttgcagtgatggcacattggttaggatccaacagagacataatcccaacaaggtcagagtttgacagtcttatcagagaaggatcatccgagtggagaaatatgtgtgaaaacgaggaataccgggaacgg

SEQ ID NO: 515 - DNA, 413 bp, Arabidopsis thaliana
ttttttttttttttttttgcaggagcagcttataaataaacctgcatactagatcatagttttcaacaagtcttcaagcaacaaaataagatgttcaatcgaaatgctcttgagctattaagcagcagcagcctcttttgcagaagatggaaaagcatcggttttcgaatacagcccgagttcctcctcgagtttcttccacgcattcaagaaactcggagggaatttcttcttcaccgttctaatcaaccctttagcgtcatctcttttcttgttctccaccaatcccacaaccaaatgcttcaaagtgttgaaatctggaatcttgtgcatatacacactcttcttgaagatcgcatagccttgctcgtacaatcggctataacaaagatgaaatatcaatgtcctaaaag

SEQ ID NO: 516 - DNA, 413 bp, Arabidopsis thaliana
ttttttttttttttaaactggagtggttctttcattacatagtaagacagataacaaagattcaaagagaaccaaacaaaagaagctaattcctattgtgcactcagactcttttccaaactggtgagaattgagcataatcggtgccatctacataacgaaattgttgtgtttttatcactaaagctttgatcgaaccatcgagtttgtgactcatatcgatctttttattctcccgtttgccatttgcagactgtaacctcttcaaagctgtgttctttaagcttccttggttatctgatgatcactctcttatagtctttggcttcaaacaaagacatagaaactgcttcttcttctccgtctttctcttattcctgctctgattctgatcttgagttttagcattactt

SEQ ID NO: 517 - DNA, 413 bp, Arabidopsis thaliana
tatatatagctacaattttgttcaatatcaaaaattaaagaaagatagacaaaaagaaaaatgaaagaatattgaatctaaactctttcttctactcatagctctacagcttccacttactacatagccccttcacaagttttaaaaagccatccgagcaacaacaaaaatattgattttatctccagaatttgcaggagacataatttggatcagtgaaaagactgtgtgtagtgagtgttgtttatggtgaaagaagcatataatattttgatgttgcttttgagttattttttgatgaatggtttttgacagacgagaagtctttggtcactaccatcttgaagatcaatgactcttgcttcccaacgcactcgagctgcaagtgctcgagccatctcgattactcccac

SEQ ID NO: 518 - DNA, 413 bp, Arabidopsis thaliana
tttttttttttttttttttttttttttttttacaaaaagtaaaccatccatgagattgacaactcccaagtttacatcataatatacaaaccttctatacattcaactttagttctacaagcttctgtacatggcaaatacataatttgaaattacacactgacgacggaaatgatactgagatatacagagagaatactgatttaatcataacaaatcgaaataggaatatttggggattggtggtataaacaaatgcgaagacggtttagggtttctatgcactgaatccacggttaagcgagctccaaggaccagttggcagtgtggtacaagcctgtgaagctgcctcctccatttgctccatttgaatccctgcattgcagatgtttgcaaaagacctcatgtgcttg

SEQ ID NO: 519 - DNA, 413 bp, Arabidopsis thaliana
ttttttttcactggaacttattaattgcgattaattatgcaatttttattcttttggtttgaatgcaattttatcctacaaaaatataagaaactcaacaatgaaaactgaaaaatcgaaaagactatcattccttctatacattgaaaacattctctacccatgagagtccatttggacccaaacctaacaattccttcacacataaattgttcttgtctaaacactactaaacaacaacacacaaaatctcacaataaaacaatcaaccaaaccgctacaaacgctttaaatcaatttcttaccacattcaatgatttcacaagattagtttacatcactcactcagagctatttgagttctcctctctactatcatcatcatgatcactctgttgctgcttctcttgatg

SEQ ID NO: 520 - DNA, 413 bp, Arabidopsis thaliana
tcgagcggccgcccgggcaggtggcgaatcagtcctctcttccttctcctatctattgtgtttctttcaatcaagataacagtggttttgcgataagttggaaagattccttcaaaatattcgattccactacaggcagactctgctatgaacgagctgctggagcctttgttattgttgagatgttgtatagctcagatctacttgcaattgttggagctggtgaacaggcttctctatccccacggcgtctttgtttgttcaagaccacaacgggtttacctcttagggaattgaattttttaacttctatactcgctgttcgtatgaacaagaaaagacttgttgttgtgctgctagagaaaacattcgtttacgacttgaatactcttgtcatgcttgatactatcgac

SEQ ID NO: 521 - DNA, 413 bp, Arabidopsis thaliana
tcgagcggccgcccgggcaggtactcttcaagagttggcatcttattgctgctgcttcctcccccaacattagcagttacttcattgttctcacccaccatgcgtatcacctgagtgcgaatattactaggatctgcacctaaattctcaaggactcgagctgcaactccttcaccttcacgtagcagcccaagcaaaaggtgctcggatccaatgtaattgtgaccaagttggcgagcttcctcaagagagagttcaagaacacgcttggcacgaggagtgaatgggatctcaacagcaacaaagccacttccccttccaataatcttctcaacctccacacgtgcatcttttaagttaatccccatggatttcaaaactttagcagcgattccagtacctcggccgcgacc

SEQ ID NO: 522 - DNA, 413 bp, Arabidopsis thaliana
gtatgacatctgctgacatcttcagctcatataatgaccatacaatcgatcaattggatctcttgcttactcaactcctccttaaatcttcccaagacaagcgatttgtttgtgaagcagcagaaaaagcattagtagcaatgactgcacatgtttctcctgccttgctgttgccaaagcttcaaccttttctcaagaataggaatcctcggatccgcgcaaaagcatccacgtgcttctcccgatgtgttccccgactgggcattgaaggcattagagaatatggaattgagaaactagtccaagcagcatcgtctcagctcagtgaccaactcccagaatctcgggaggctgcacgggcagtcttactggaacttcagacagtgtacaagaaaactactaatgtcgaaccg

SEQ ID NO: 523 - DNA, 413 bp, Arabidopsis thaliana
cttgcagaagaatgaaagaaaaagcaataaccctccaaaccaaattctaaagcctcaaatttggaatattccctttcttcttccttccctttttttttttttaatttgccatttactcattattgatcttatgtgagacgacctcctctgtttctttcttcctcgtaacagtaaagggtcttcctttttaatctgaatttaccaatctgattcttctgttttttgttttttttatttgtctatcttttaaactatttgaaatctaaactttgtttggttcttcacgatttttaatctccgatgaatcaaattcatcaaaagattcatcttttagatctggttacgtaattcgatttgctctgttttttgtttttcgttttgaattctttattaagtaaccaaatttggggaag

SEQ ID NO: 524 - DNA, 413 bp, Arabidopsis thaliana
aggccgtgctgcagccatggttgctgccatgaatctgcaacataatctggcaaagattcaagctgatgcaatgcctgagcactatgaagcagaacttgaaatcaatgacttcccacaaaatgctcgttggaaggtcacccataaagaaactttgggtccaatatcagagtggactggagctgctattaccaccaggggtcagttttatcctacaggacgtataccgggacctggggaacggaagctgtacttattcattgaagggcctagcgaaaaatcagttaagcacgcaaaagctgaactcaagcgtgttcttgaagacattacgaatcaggccatgtcctcacttcctggaggagcatccgggagatactcagtcctttaatgaaagcaacaatgaggtgtgtgattat

SEQ ID NO: 525 - DNA, 413 bp, Arabidopsis thaliana
aactgagattggagtgaagaaagctgaatcagagacgatgcctaaagtgaagctgaatcagattgatcttgagtgggttcatgtgattagtgaaggttgggctagtcctttaaaagggttcatgagagaagatgagtatttgcaaagtttgcattttaattctcttaggttaaaaaatgggacttttgtgaacatgtctcttcctattgttcttgctattgatgatgatactaaggaacagatcggatcatctgagaatgttgctcttgtttgccctcaaggagatatcattggttctctccgaagtgtggagatttacaaacacaataaggaagaaaggatagctagaacttggggaactacttctccaggattgccttatgtggaagaatatattactccatctggaaact

SEQ ID NO: 526 - DNA, 413 bp, Arabidopsis thaliana
gattccatcaacggctcagtctcctcacgccgctgcaccgggaagctctacgccgggatcaatgactccgccgggaggagcccactcgcctaaatcttcctcccctgtttctccgacgacttctcctccgggatcgactactccgcctggaggagctcactcgcctaaatcttcatcagctgtctctccggcgacttctcctccaggatcaatggcgcctaaatccggctcccctgtttctccgacgacttcaccaccggcaccacctaaatccacgtcccctgtttccccatcctctgctccgatgacttcaccgccggcaccaatggcacctaaatcatcttcaactattcctccgtcttctgctccgatgacttcaccacctggatcaatggcacctaaatcttcatccc

SEQ ID NO: 527 - DNA, 413 bp, Arabidopsis thaliana
cttttttttttttttttttttttttttttagtttaatttagaatttatagaaaaaaagaagtggctctcatgacaagtagtctaaattcagtagaacataagagttatttcatcacagtactaagaggaagaagagaagttgctctgcaattccttgatgcctttggaatcaagaaaagaagttttgcccttgagaaaatcagagtaccaatgagcagagagtctaggagatctcttgcgatgtggatcactgaaatttacagagtacaatccataaccataatcgtaccgccctataagctcgaataaatccataaatgaccatacaaaatagcctctagtgtctgatccattccttatggatttgagcacaccaccaatgtaagcattcatgtattccaccctatgtgtat

SEQ ID NO: 528 - DNA, 413 bp, Arabidopsis thaliana
  misc_feature (1)...(413): n = A,T,C or G
gtttgcaaaaacccatcccatcaaaaataaacaagagggcctaaagaagaatcctaaagactttacgggtcttgtttaggataaaagaaatgcctgccggtggattcgtcgtcggggatggccaaaaggcttatcccggcaaactcactccctttgttctcttcacttgcgttgttgctgccatgggcggtctcatcttcggatacgatatcggaatctccggtggtgtgacgtcgatgccgtctttcctcaagcgattcttcccgtcggtgtatcggaaacaacaagaggacgcgtcaacgaaccngtactgtcagtacgatagcccgacgctaannntgttcacatnntctctatatctagcggcgctaatttcgtcgctggtggcttccaccgtgacaagaaagttcgga

SEQ ID NO: 529 - DNA, 413 bp, Arabidopsis thaliana
tcgagcggccgcccgggcaggtctccaacgtggagaacgaagaagtcagagaatgggcgcgtgaggtacacggtctttggagaaatctgagctgcagagtctctgactcagtaagagagtctgccgaccggcacacgcttctaccgttgccggaaccggttatcattcccggttcgagattcagagaagtctattactgggattcttattgggtcatcaaaggacttatgacgagtcaaatgttcactaccgccaaaggtttagtgacgaatctgatgtcacttgtggagacttatggttacgctttgaacggtgctagagcttattatactaacagaagccaaccacctttgttgagctccatggtctatgaaatttataatgtgacaaaagatgaagaacttgtgaggaaa

SEQ ID NO: 530 - DNA, 413 bp, Arabidopsis thaliana
ctcaaatgctgagattagcatgacggatatttggaaaactgactctggtatcgattgggattatggaatagccgacgtgagtactccaccaccaggaatgggcgaaatagcaccaacagctgttgactcaaccccgagatgatcgaataccaagcacacttctcaacttctgatcccaaatgtgttacctcacaacactccctaaaatcatatacaaggagggagcaactacagaacgtgtatgaaccaatggcaggtgcgttccatacaatgtaccattagattatgattcatttatcgcctagagtgatgttgtagaggagcaccgagaaactaatgtaagtttaacagagaatgtacttcatcggctgcattggtacactatttgattataatatttttgaccaaaaaaa

SEQ ID NO: 531 - DNA, 413 bp, Arabidopsis thaliana
cttttttttttttttttttttttttatcctaagttccttgtttgacaaaagatgataatgaacatagaagagtggtgtgacattacaatactaataagattatcaaaaagagcatcaacaaatatttgaagaacacctaaaaaaaagataaacacattgatgaaaatgataaaaactaattaaatgtattttctcgtttaagaacttattagaaacacatagatcaaagtttattattaattcagcttctgacagacaacaaagaaggaattgcacccaagtttggagttgtgttcttgcttgtagtagaatctgaaattgtacggcctcttttaccagagtaagaagaagaagtaaaagctctcattggacttgcaaatgaccatccccagcttctgttccttcctccacca

SEQ ID NO: 532 - DNA, 413 bp, Arabidopsis thaliana
ccgaaaaaggcgcacaggccgtggttcaatacatgaatgatcttgtggaggcaagaaacaccaaatctcaaagaactaagccgaaaaagagttgggttaacagtatttgcttcttctgcaagtcctctaccaactagagaaaacagagcagcatggagatcctctaaaccactctgaacaaatccgaccttttaatcgtcaggcaggacagaagaatcccgtcgtctccagacagttcaccattcattcttttattcacaatcacatgattcttcacacaatttcactttactcttcgtcgtggtgtttgtttatacctcaattatgactggatcctaaggaaaatataattgcatttgttaatctcaaagtgattatattcttgtttctctaaaaaaaaaaaaaaaaaaaag

SEQ ID NO: 533 - DNA, 413 bp, Arabidopsis thaliana
tcgagcggccgcccgggcaggttaggctttgtcgtgagagaacgagcaaagccatggttaaaaatcgacagattcaggttattgataatgaccgcggagttcatatgaggcccatgcctggaatgcttggtttagtttcctccaattccaaggaaaagaggaaacctcccccagtcaagcaaaccgaggtgaagaggacgaggagagatcgtggtgagcttgaagctataatgttcaagctatttgaaggccagcctaactggacattgaagcagcttgtacaagagacggaccagccagctcagttcctgaaagaaatactaaacgagctgtgcgtgtacaataagagaggatcgaaccaagggacatatgagcttaaacctgaatacaagaaatctgctgaagatgataca

SEQ ID NO: 534 - DNA, 413 bp, Arabidopsis thaliana
acacacacaaacgcacatacttgagcaaagtcatcacaatgagcttcttcatcgaagattctggtctcatagtcactcagcttctctacaaaatggctgttctcatcaccgtcttgagatggatcctcgcttggatcttacgctaccgatccagatccagatccacctcttcttccacttccgcctgtccttcgatttcctcacaggcgatcaaagaaagcctctccgtgacgacgttccgtgacgcagctgagagatctccggcgatgatcaacgacacctgcgctgtgtgtctcggagatctggaagatggagatgaggttagagaactcaggaactgtagccatatgtttcaccgtgagtgtattgaccggtggttggattatgaatgttgcggtggtgatgagaataac

SEQ ID NO: 535 - DNA, 413 bp, Arabidopsis thaliana
tcgagcggccgcccgggcaggtgtctttattatagatggagagagattttctcgggttgggttcgaaaaattctccgatcactgtcaaggaggaaaccagcgaaagctctagagattcagctcccaacagaggaatgaactggtctttctcaaacaaagtatcagcttcttcttctcagtttctatccttcaggccaactcaagaaaatagacatagaaagtctggaaattatcatcttcctcactctggttccttcatgccatcatcagtagctgatgtttatgattcaacccgcaaagctccttatagttctgtacagggagtgaggatgttccctaattccaatcaacacgaagaaactaacgcagtttccatgtcgatgccgggtttccagtctcatcattatgcacca

SEQ ID NO: 536 - DNA, 413 bp, Arabidopsis thaliana
ttttttttacaaagactattttatttcagacagaaatatcattcacagattagtcaacattaagtacaaaagtattatacaaagctttgttcgttttggtcgctgagtctggtccaaatgccaaaccagtagcgacacttacaaccaccaattgtaaactacaacgagttaggtttccaagtcgtagatcgtggtagcttcaaagccattgaggctgttgggacgaatccaagtaggcgacatcgctgcaaactgtgatttcagattctgagcagatgatttccgcattctgaagtgtgaatccgtgcattatgggcaacgggaatcccttttctaggtggtcatttgcatatggcacaaacactgtttgtataacagtccacactattggctgaagaagatgcagatggaga

SEQ ID NO: 537 - DNA, 413 bp, Arabidopsis thaliana
ccgccctttttttttttttttttttttacaaaatatattaccacactttacattgatacattcttccttttgtccaaaaacatatatacaaaatactggaactgttttttatcaagttccaaattacaaacatatcgttttagcttttgataaaaagaaaacatggtattgattttagctgtgtaaatagagagatatagtttcaatagttcaatgaaggatatagataatcccatgttgttgttgatacctgttttcagacacggtacagcttaataacctgatcgatcttggctcgacagacgggacatccccaattcttggatttgatctccttcaagcaagacatacatcccgcgacatgtccacacgggacacagactgcttcagatggagcatcgagacatatcgca

SEQ ID NO: 538 - DNA, 413 bp, Arabidopsis thaliana
gcggccgctcagtgggctgctgagttcgtgattgaatttgctgcagcgctgccgaaatcaaaactgaagttaatttgggtacatctccaagacaactgccagtggatccttctacagtttatggccagggaattctgcaatcaaagcctgggatggggagtgcaggattaaaccctggagtgagtggtcttcctttaaagggatggccattaactggcatcgagcagatgcgaccaggtttaggaggccctcaggttcagaaatcttttctacaaaatcaaagtcaatttcagctctcgccgcagcagcaacaacatcagatgttggctcaggttcaagcgcaaggaaatatgactaattcacccatgtatggtggtgacatggaccctcgaagatttacaggattacctaga

SEQ ID NO: 539 - DNA, 413 bp, Arabidopsis thaliana
  misc_feature (1)...(413): n = A,T,C or G
gcggccgcttagaacaaaagtttcttctttcttctctcccgagaggcctctcgctgttcattgaagttctcttagaattttctatcaccttggttgtgtaatttgcaaaacagacaacaatggttgagcgtgggaagaggactcacaatcgtttcagagacaacaacaatgacaacaaccggaatcaaaggagaagactttcttacgaatccgaagaaaanaagatcgataacaaagacgatctcgttgttgtttacagaatcttatgcccaagtggtgtcatgggaagtgttataggcaaaagtggcaaagttattaacttgattaggcaagnnnctagagctaggatcaaagttgttgatccttttccaggttgtagcgaaagagtcataacgatcttttgctcggtttcg

SEQ ID NO: 540 - DNA, 413 bp, Arabidopsis thaliana
gcggccgccaaagacacactcacaatttaaaaaaaaacgtttcttttctcttcgattcccgattacggcttttgattttgtgggactcttctcagtttttctgggcttttggtttttggattctatcttctttcatttttcagattttttattttattttgttgtatttctatattgggaaacaaaatcatgcagaggatcgtcgataatgctcttgctatcacaaaagagtcagtgaaaactctgacttatgagtctttgaacaacattgcaagatgcattaatggattttctgcgcttctcttgacacttttgcccggaaagtccaatgttcttgaaggtcttcatggatgggagcttaggcctacattgcgtggacctcgtttaccacgctggatgcataatggagtctc

SEQ ID NO: 541 - DNA, 413 bp, Arabidopsis thaliana
ttgggtggcctgggccaggccggtttccaccttctgctggctgccgccgaagatgtggccgaggatgccggcaccgtcgctggcggcaccaccgccaccaccacccagtaccgagccgagcacgctgcccaggtccaggccgctgtggttgttctgcaaggcgccgagcagggcctgcgcgccctgcggctgcgaggcgttgttgcccagcgcgcccatcagcactggcagcgcggcactgatcgcgccggaagcctgggtatcgctgatgccgagctgctgcgacacctgctgcagcggggcgccctgcaatttggcgagaagttcatcggtcaggctcatctgcggaatccttgattggggttgggcgtgcagaaggtacgacgcggaccgttaaaacggcgacgccgcct

SEQ ID NO: 542 - DNA, 413 bp, Arabidopsis thaliana
atgaaggtgtcgaaggtaacaccttcgtggtcactggaggtcttggcttcgtcggtgcagctctctgcttagagctcgttcgtcgtggtgctcgccaagttcgctcttttgacctccgtcactcttctccttggtccgatgatctcaaaaacagtggcgttcgctgcattcaaggtgatgtgactaagaaacaagatgtggataacgctttagatggagcagactgtgttttgcatcttgcttcttatggtatgtctgggaaggagatgcttcggtttggtcgttgtgatgaggttaacatcaacgggacttgtaatgtcttggaagctgcgtttaaacatgagattacaagaattgtgtatgttagcacttacaatgttgtgtttggtggtaaagagattctcaatggtaat

SEQ ID NO: 543 - DNA, 413 bp, Arabidopsis thaliana
gcttcttcctcggttctcttcagcagattatccagcctattcatttctttccccatcgaagcaacatcttcttccattttcttcacataattcaccaaattggcttctttcatctcccaatccttctttgagctctcgaaatgtttcttggtttgttcaaccgcgctaacaagaacatcgatctcatgtctcgcctcgtcaagcatattctcgtacttctcgtttgtggctttaatcaccaacttcaagtcatctatttgtgtttcatactcgtgatcgccttgactcaacaacttctctttcaactcccttccttcactcgacacttcgtgcaaagctgaagccaaactctccattgctttcttactcttctcctcttcctcttttgagctctctaaatctgataagagctt

SEQ ID NO: 544 - DNA, 413 bp, Arabidopsis thaliana
aatcgccaccgtaactccaccaccaccagctaaaccaccttcccccgacatcacaataaccgatcgagtcttcctcgacttctccctctgccccacctacttccgctcagatccctccgcgacactctcctccaccacaccttgctccgattcaactcctctcggccgcgtcgttctcggattatacggccgtcacgttcccataaccgtctcaactttcaaacgtatgtgtacttcatcttccacatcttacaaaaacacacctgtccacaaaatcttccctggtcagtattttctcgccggaagacaaggaggaggacggcgagatacggcggaggttggttattcactcagagacttacctcgtaacaccgacgttgttaattccaaagcttttttacttcctcatgctc

SEQ ID NO: 545 - DNA, 413 bp, Arabidopsis thaliana
actcacaagtcacaacaaagatttgccgacaacaaagatttggaacgagagctcacaaaagcagagtaaaagagaaaagcagcaagtttcagtttggatcattctccaggcaagattcagtttcagtacgatgatgagtatccaaagccggcttttcttcccataagtgatgaaagcatcatctgtcccacaggtgtttccgatccatcagaccatccatgcttctcaagcaactgttccagaaagttaccaaccacataagaaatccccgacaccgatacagcaattgacccgtagtacagaatgctcttcaggtagctgcctctcgggtacctcacatgagctttggctatggcgagcaagacgatgcagaatagagatgccccgaaaactgaagcaactttgtagtcttt

SEQ ID NO: 546 - DNA, 413 bp, Arabidopsis thaliana
  misc_feature (1)...(413): n = A,T,C or G
tttgaatactggttcaagtgcttcacatattgtggtgattgataggaagactaagaggctcgtggaagagttgattgattcaaagattgttatgtctatgagagctatttaccagtcaaaaataggactccggcttatggaccanggagcaaaagagattttgcagaacctttctgagaaacaggggaaaaaaatgaactcagttgaatctgcccaaaatattcccagctttctcgagtttttcaaggatcaaataaacatggccgaagtcaagtatcctctggaccattttaagacgttcaatgaattcttcgtacgggagttaaagcctggtgcaagaccaattgcgtgcatggatcaggatgatgttgctgtatctgctgctgattgtcgattaatggcatttcaatcgg

SEQ ID NO: 547 - DNA, 413 bp, Arabidopsis thaliana
  misc_feature (1)...(413): n = A,T,C or G
tctacatttgtgcccaatgtcttgatggggatgcaagaactgagataccttgcgttaccatctgatatggggaggaagacaaaactagaattgagtaatctagtaaaattggagactttagagaattnnnnnacagagaatagcagcttggaggatctttgtggtatggtcaggctgagcacgctcaacatcaaattaattgaggagacgagtctagaaactctagctgcatctataggtggattgaaatacctggaaaaacttgaaatatatgatcacggttctgagatgaggacgaaggaagcgggaatcgtatttgatttcgttcatctcaaaaggctatggttgaaactgtatatgcctaggctttctacagaacaacacttcccttctcaccttacaaccttatatct

SEQ ID NO: 548 - DNA, 412 bp, Arabidopsis thaliana
caaagaaatgtggtgatcgcattatatatacacagagtttaaccaaccaaaacattacaaaaacattaaagacaaaatactgtaaaataaaaaacaatcttcaaaacatagatatgctcatgcatagacagagggaacctcaaaaaaaaaattatttagcgtagtagccgccgattcacagccggaggtggcggtggctgagcttgaaccggagtagcttgacgaggtgcacctccacctcccccaccattactctcccaaggcttaacagtaaacaccacaattaaaaccacaataatgagcaatagcaaaatggcaaagcaagtccacttccgtgtgttcttctgataaaaccgtgccttaacaagccggtccgcaccagaccgaacaagcgagttagctcgtttgacgt

SEQ ID NO: 549 - DNA, 412 bp, Arabidopsis thaliana
tcgacggccgcccgggcaggtactcctgtgtgagtccaccagtgccaagaattgaagacgaggaggtccatatttttccaagcatcagctccatcttcaatggctccaaggttaagcacacgcccgacactttctttggagatgtccactaggtatggtgttcggtataggaatagtgtgacgtcatattcctggaaagtgagagaggagagtggggttcgcttgagaaaagtggtcttagtgtttggaaccgacgaatgtatcatacatgccaacgattcccacatgtttagactcagtgagtcacccacgaacatcactcgtttccctctccatttcttcaaaaacgcttccccatcaaaccttgggacggtgcatgaatcaggctgccaagagtacctcggccgcgacc

SEQ ID NO: 550 - DNA, 412 bp, Arabidopsis thaliana
  misc_feature (1)...(412): n = A,T,C or G
ccacgcgtccgcacaacaatatcacactcagataaatatcaagagatagagagagtaacagtgatatagtcgagaaaatggcgtcgtggatgaaagcggtgctaatctctactggcgtcgtagccacggctatgcatctaaaggttattgttcctgtggctatggatttctcacaaaatccgattattttgagctctttcctcacgtggctgaaaccgccgtatctttacgtcatcactaacgtcatcatcatcgnnnncggagtttcctaccggattactactgtctccagccacgtcgacggcaaagactatgaggcttcttacagtggcgacaataagtttcagactgatcatcagcagatcgtccaagaagctcctctaaggcgacgaacggagacgaaagatgcgga

SEQ ID NO: 551 - DNA, 412 bp, Arabidopsis thaliana
agataccacgaacaagccttctacgaactcgtcatggggtcctcttctgcacgggacaggctctacaaatacaaaatctgcctcatctcttccatcagatctctgccgtcgattctccatctacgaaatcaaatccgccacaaatgatttcgaggaaaaactaatcataggagtaggcgggtttggttctgtctacaaaggacgaatagacggtggagccacacttgttgcggttaaacggctggaaattacatcgaaccaaggtgctaaagagttcgatacagagctcgagatgctttcaaagcttcgacatgtacacctcgtctctctaatcggatattgcgatgacgacaacgagatggtacttgtctatgagtatatgccacatggtacacttaaagatcatcttttc

SEQ ID NO: 552 - DNA, 412 bp, Arabidopsis thaliana
tcgagcggccgcccgggcaggtcagagagagaaacaatatttctaatctattacaagtagcatgatcggccaacttatgaacctcaaggccacggagctctgtctcggcctccccggcggcgctgaagcagttgagagtcctgccaaatcggcggtgggaagcaagagaggcttctccgaaaccgttgatctcatgctcaatcttcaatctaacaaagaaggctccgttgatctcaaaaacgtttctgctgttcccaaggagaagactacccttaaagatccttctaagcctcctgctaaagcacaagtggtgggatggccacctgtgaggaactacaggaagaacatgatgactcagcagaagaccagtagtggtgcggaggaggctggcagtgagaaggccgggaacttt

SEQ ID NO: 553 - DNA, 412 bp, Arabidopsis thaliana
cttttttttttttttttttttttttttttttttttttgtagtttgaaaaaagataacatatagtttgacttgttagctacaagcctagaatgctgttttaagcatgaagtagaaaacattttttcttattggtacaatggttgaggaactctagagcgggaacaaagaaaaagtagcgtaacatatgcaaaacgcacaaatatatatcttgcacacggacaagtcttttcttcatatcatgtaattagacaaatacgacttttcatcaaagatgctcgcaagaaatcctgcagtgtactctggtatggtgatatctttgtacttagcagggttttcatcagacaaaagatctttaatcggtccataaaccgtggaatttggagaaagactcgagctaaagaagcacgcaact

SEQ ID NO: 554 - DNA, 412 bp, Arabidopsis thaliana
acgcgtccggaaaaaagagagagacagagatttactcaacggctaagatgaaaagttcatcggagctccttgtaataatgattttcttattcttggcgcttctcataatctcccacgctcaatcacttccaggtacgccgtatggcggccctggtccgtatccgcgtagttaccctgtgtgttacccaccgtattgccgtccatgagagtttcaatttggtcacatgaatgaattatagtcaaatacctatatcaaggtgatgtatgtgtgtatattattatatgttttcatcatttgatggagaataaaaagcttaggaaatatatccatgttattatatgtttcagtttgtaatatgtataatgatattgctggctctgtcccttaaaaaaaaaaaaaaaaaaaaaaggg

SEQ ID NO: 555 - DNA, 412 bp, Arabidopsis thaliana
ttttttttctttaataataccaatagaaacaaatgtttttatgacaacaaaaaattaaaaacaacaattaaaaaacaactctcaggatccgaatcagttcccgcttcggatcgtcagacacggacaagtacgccacgcatgacgtcatcatatctacgggttctgtttcatcatggacacgtcagcggagacgatgagagccgttgattagacaagaagaagaagggacggctgagatgccttgacgcgttagctcagccaaaacgctctccgcggacggcggttttagcccgagcggtagcggcagccacggtttgcttatcgcttctttaaccacttgatctaacatttcctcgtccggctgactcgccggcattattttgaagccggtttcagctccgttgggatattg

SEQ ID NO: 556 - DNA, 412 bp, Arabidopsis thaliana
tggaatgcatctggttcatgccttgcaacatgtagtagagataagtctgtttggatttgggaagtgcttgaagggaatgaatatgactgtgctgcggtattaactgggcatacacaagatgtgaagatggttcagtggcatcccaccatggatgttttattttcttgcagttatgataacaccatcaaggtttggtggtctgaagatgatgatggtgagtatcaatgtgtccaaaccttaggtgaatctaacaacggtcactcttcaacggtatggtccatctcatttaacgctgcaggggacaagatggtcacttgtagtgatgatctaaccttgaagatatgggggacagatattgccaagatgcagtctggtgaagaatatgcaccttggattcatctttgtacctgcc

SEQ ID NO: 557 - DNA, 412 bp, Arabidopsis thaliana
ccacgcgtccggacgatcgatctaaggagacgatgaagatcttccacgttccttgtctgcaagacaactactcttatctgataatcgatgagagcaccggagacgcggcggttgtggatccagttgatccggagaaggtgatcgcatcggctgagaagcaccaagctaagatcaagttcgtactcactacgcatcatcactgggatcatgccggtggaaacgagaagattaagcagttggttcctgatatcaaagtatatggaggttctctggataaggtgaagggttgcactgatgcggttgataatggtgacaagctgactttgggtcaggatattaacatattggctctccacactccttgtcacaccaagggtcacattagttattatgtgaacggaaaagaaggaga

SEQ ID NO: 558 - DNA, 412 bp, Arabidopsis thaliana
  misc_feature (1)...(412): n = A,T,C or G
ccactttaactgacgtggataccttaagaaagaaatgcagagttgttgagcagataagagtattgctaaaagatgatgaggaggccaggattctcatgggggaaaatgggtgtgttgaagcgttgcttcagtttctgggatcagctctgaatgaaaataacgcttcagcccaaaaagttggagccatggctctctttaacttggctgtggacaacaacaggaacaaagagttgatgctagcatcaggaattattcctttgctggaggaaatgctctgtaatccacattcccatggttcagtgacggcaatttatctgaacctctcgtgtcttgaanaagcaaagcccgtaataggttcgagtctggcagttcctttcatggtaaatcttctttggaccgagactgaagtcca

SEQ ID NO: 559 - DNA, 412 bp, Arabidopsis thaliana
tccactaaaaatcttacaaagatcagcttcctgcaacatcttgcaggtttttgggaagagaaacatcctgaacgagaatattactttcattatctatcatgtaagacacgtctagtccctccagaaccaagtgataaacaatttcctcatccaatgtatcttgtggcttgttccgttgcgacattgatcgtatgtcccatgacaggacctgcgtgatcaagctcctaaactcatctgctgaactatatagagacttcttttctatcagtttccagcagctggtgatggatgaagagaaggtatctgagaaagtcacagaagccacagccaatgagcagtcctcctttacccagtttggcactgaggctccttgaatactgtccgagtatggtaaatatggtttgatgtcgag

SEQ ID NO: 560 - DNA, 412 bp, Arabidopsis thaliana
  misc_feature (1)...(412): n = A,T,C or G
cttagaagcacgatagcttatacattcttccatcatgtccaatcatatatataatattaagagtttaccgtcgctgagtcatacagtaaataaaaatacagacaatagttacctcaatcaaaatcacaaaaccaatgactctttttctggttaatgcttgtgattccaatggggtagggtttcatacagattagaatcaggagcaaatggattctgcatgccttcacggttcacctgttccggcaagaaatttgccgtctccactctctgattttgtgctaaaccagcactggtgttggtacttgaatttgctggtttcaaaatgtggttagagtttggcggaatactagaggangcactcggtgtgttgctgaatggtatgcccatgtttggtcttgaccaatgcaaaggg

SEQ ID NO: 561 - DNA, 412 bp, Arabidopsis thaliana
cgcccttttttttttttttttttttttttttttttaaccacacaagatacttctttactactttcaaacaaaagtcttaataatgttaaaagacagacggatacatcatcaccatcaccaagaaaagagtcatcatgacatttttaacaatgaacaaactaaaaagagtcatcatgatatttttaacaagaacaaactacaagtcttatagaagttttcttcggtattggaagcagtttttgcaggtcagagcatgcaatcagttcttgcaggaagccttctgaagaaattgagaggaacggatggtagtttgtatctgaacctcggatgtctcagagcatagattccaatacaaagagccacaacctggaaaggtgtcacatagagaatgactgcggcaatcaagcagaac

SEQ ID NO: 562 - DNA, 412 bp, Arabidopsis thaliana
gcggccgccgatctgttacttcttctcctggcgatcgctcttcttgcgacgccggcgttctccgatctggttttatccaaagtcgaacgtcgtatcgatgtgacttcacagattgctcgtgttactaagacccttaaggttgtaaattctggctctgaatcagtttctgagtttgctttgacattcccaaagtttcttggtaacaacttggcttatctatcggttgctcctagtgagggaaaggggaaatctaaacgaactttagtgaatctctctgtgagagaagctgatcagaaaggtttacctgattcaattagtgtttactcagttgcattacccaaaccactgagtaaaggcgatactttgacgctggaggtagttgctgcattcaccaatgtacttcagccatttc

SEQ ID NO: 563 - DNA, 412 bp, Arabidopsis thaliana
tttttttacttgaaccagcctatgttcggggctgaaagaatcaaaagatcgaatctttcttaatttagataactaaaaatgaagagtagattctcaaattataaacttttttatacagacaaaaaaaaaaagttgaatatctccgaagagattcagattaatcgacataatatgcttctctgcattgttcttagctcatgagagatctcaagcaccaattgttgctgaatcttttccacaatatcagacacaacaccttcagattcaccaccaaaatccaaccaaagacatggctttattagatcagtttcaatgatctgatccaatgatcttgtaggagagtcagagcagagtaaactccagtcaaaatgtctcatcgtctcgtgaatcagatcatcttctctaagggatg

SEQ ID NO: 564 - DNA, 412 bp, Arabidopsis thaliana
gcggccgcttacggtttagtagctctctcagcattcaattctcacagctccactctcagaggatatgaatttaggttttctaatgactggttccatgcattgaatcacatctcccactctaaaatcattccaatctccaaacacaagcccacactcgttccctttcccgacctgttccacgtcttgtttctcccgtttcagcgacgcacacgagccttcgaagaccacttctccgcttcgtaacagcctcatgagtccgcttctacatacccgaccatccatcactttgcaacctgcgatgtttactccatcttcttcggttcttctctttcctaagatcttgaatatgctaagtacctcggcttcaccagacacctccatctccgaaactcctggtgctttttctacgatc

SEQ ID NO: 565 - DNA, 412 bp, Arabidopsis thaliana
tcacaacaaatttcggtagcatcagatatttgcaagacgtagatttaaatgttatatattgccaaaagaaacattggagatcacatcacactgcatcaacatcaagccagtcgtttgattttttcttctcttttacctcttttagctgaacccaatctggtgattttttgtctgaagaatcagaaccagagttagtaaggttcttgtaactcactttcacgtctccttcgttatcgtcttcttcttctagatcactgaatgatacatcttcttcgtcttcaccaaaaggatgatttgtggttgatcttcctccaatggcgctaactgatgaagtctcttcatcattcaaccaatcatctgcatcgtcgtcgtcttcatcatccacttgcacattaataaatctagatgaaga

SEQ ID NO: 566 - DNA, 412 bp, Arabidopsis thaliana
  misc_feature (1)...(412): n = A,T,C or G
aagagctgaagttccaagaaccctttcaccaaagcctccttctccaagagctgaagttccaagatccctttcaccaaagcctccttctccaagagctgaccttccaagatcactttcgccaaagccctttgatcgatcgaagccatcatcagcctctgctaatgcccctcctactcttaggcctgcttctactcgagttccttctcagagaattacacctcacagtgttccttctccaagaccaagttcaccaagaggtgcctccccacaagccatctcttcaaagnngccttctccaagagcagagccaccaacattggacactccaagacctccctctccaagagctgcttctctaagagcagacccaccaagattggatgctgcacgacccaccacgcctaggcctcct

SEQ ID NO: 567 - DNA, 412 bp, Arabidopsis thaliana
  misc_feature (1)...(412): n = A,T,C or G
ttctggtgtggttatctttatcatccgaaaaagaagaaagcggtacacagatgatgaagagatacttagtatggacgttaagccttacaccttcacttactcggaacttaaaagtgcaactcaagattttgatccctcaaacaagcttggagagggaggatttggccctgtttataagggaaaactcaatgatggaagagaggtagcagtgaagctattgtcggtgggatcccgacaagggaagggacaatttgttgcagaaattgtagcaatttctgcagtccaacatcgcaacttagtaaaactttatgggtgctgctatgaaggagagcatcgtttgcntgtatatgaataccttcctaacggaagtcttgatcaggctctatttggggaaaagactttgcatcttgat

SEQ ID NO: 568 - DNA, 411 bp, Arabidopsis thaliana
ctttttttttttttttttttttttttttttttcgacttcactttattattcgatacgaaattcttaaccagacgacattaatgaaaaaccctcataaactagtagtgtcttcaacatgagagattggttccaggagtgaccccaagcttcttgcagaagtccaagtaatggttaaccctgctctgcactgcagctggacgcccaccattacattcaccaccgttgatcctcctcgtggttgcaccaaacccttggctcaaaaccggacgcacattcttgttccaaaaccacatggcacactggaaagccacagttgggctacgagccaccatatctgggtccttcaagagaggaagtccaaggaactttccggctgcaccatagttgtagttccatgtgatttggatcgga

SEQ ID NO: 569 - DNA, 411 bp, Arabidopsis thaliana
tttttttttttatggattcacccacacaaacccataataatcaacaattcaaataaacataattatcctgatgaagataaaagtatatacaactctacttttgaacctagctaccactcaaacaaagagtttcccactcagaggttattataatcgtcaaatacttatccacatccaaacataggaacctgaaatttcactcaaaacactactagaacagagacaaccaatgcaagagagagaatggttaagagacccctacataaaattttaactttggaaagctacctgcaagatcgctgatgaaagggaaatcttttttggtcacacatactcattgacacgaaaggcggtgacttcgagaacgaaatcccgagttctgagtagctcaaacacacatacatctccttc

SEQ ID NO: 570 - DNA, 411 bp, Arabidopsis thaliana
  misc_feature (1)...(411): n = A,T,C or G
cgcgccagaagcggccgcccgggcaggtgattctagaccttaagaaaaagcaagagagccaagttcagctactgaaacagaaacaaaagagtgatgacgcggctcggaggttacaagatgaaatccaatccatcaaggcacaaaaggttcaactgcagcacagaatgaaacaagaagcagaacagtttcgacagtggaaagcctcccgagagaaggaacttttgcagttacggaaagaagggagaaagagcgagtatgaaaggcataagctgcaagctttaaatcagcgccagaaaatggttcttcagaggaagacagaagaggctgcaatggctaccaaaaggttgaaagagttgnnngaagctcgaaaatcatctcctcgtgaacactcagcttgtacctcggccgcga

SEQ ID NO: 571 - DNA, 411 bp, Arabidopsis thaliana
cctcgagcggccgcccgggcaggttttgcaattctgtttttattacaaagcttattgtttcctctttacagttcatgccttcatcaaactcagatgattcatctccatttccttctgatttcctctttggcacagcttcttctgctttccagtatgaaggtgccttcttaaccgatggaaaaggtctgaacaattgggatgtctttgcccatgaaaaccctgggaaaatagttgatggaagcaatggagacatagctacggaccaatatcatcgatatatggaagatatccaatcaatgaattttcttggagtcaatagttacagattatctatttcctggtctagagtcttacctaatggaagatttggagttattaattataagggaataaagtattccaccaatttga

SEQ ID NO: 572 - DNA, 411 bp, Arabidopsis thaliana
tcctccggcgcctgcacctgctccgccgtctaaaaacattccgacgtctatcccaatccctactccggccgtaactggtcaagcgaaatctaagggtggtggaaaggctaatcctggacacaagaatccatctggccgtcattcaaaaccaggtccgaggagcaaccagaatggtcctcctcctcctccttatctcgtgcatgctgtaccgtatcatccacctccttttccacctatggtgcctctgccacatgctgctggtccagattttccatatgcaccttatcctccctacccggttcctgtgcctcctgttactgagtctggcaatgagaagcaagttcaagcttcccctcttccacctgtgttgccagctcctcaaggggatcctggaaagccttggccgcatca

SEQ ID NO: 573 - DNA, 411 bp, Arabidopsis thaliana
gcggccgccggagaaattgaagaagacacaatctgattagtattctccaatattccatcaactttttgctgagggaaatctccagatttataatcgtttgtatatatatatatacagagcagcgtagaaaaggatcttagatttatagcagcaacaaaaaaatgtcaatgccactacaacgtggcatctctggagtacgagtttctgatagcagtgatgatttgagagactctcaaatgaaagacaaaactgaaagagctcgttctactgagaacaacaacttaaccttaaggtttccttttggtttcctctttagtaatcaatcttcttccaaacacggtggtggtggcgaaaacggtttttctgctgatccatatagtgcaagaagcaggcatagattgatgttgttgt

SEQ ID NO: 574 - DNA, 411 bp, Arabidopsis thaliana
ctttttttttttttttttttaaaagagacataatagttcttctctcttaattgaatctttctttacaaaattatcaacaaagttataaaagaaagtcccaataaccgaagaaatcgagacttacaaggcaaagtaccaaacacaaactctctggaatcactgcacaaacatatcctacttatgttgtcttcttttctctcaaatctcaaaatgaaccttccgtttgttccgtttgtcgcgtctctgatatagaatcagagatttctgaatctgctccttgagatcttctcagcttagaaacaagaacccacatattagcaagctcattctccagatatgcttctctctgttttgtttcttctaatatcctttcaagctcagcttctctttgttctttttcaccaagtgcag

SEQ ID NO: 575 - DNA, 411 bp, Arabidopsis thaliana
tttgtagctatagaagaaactatggaatcttatactctaattaagcccaatggcaagagaagacatgagtccagctcctaggaacaacattacataagatacaatttgaagcctaaagttacacctcatttttgtactcaagaaatcagcagctatgagatccactaaagccatgtacacaagaattccggctgagagcgagtccaagataccttcagtgaccaatgctccgacactgtgagaattgaaagacgacgccactgcggttccaatcccgatccctatcggggttgtgagggcgaaaaaacaagccattatggtcgctgatttgttcctgaattgcgcttgggagatgcatccaccgagcgcaaatccttcaaagaattgatggaaggatagtgctgcgattag

SEQ ID NO: 576 - DNA, 411 bp, Arabidopsis thaliana
tctttttttttttttttgatgcaatgtcgagagcttttattgcgaactgtaaaaagaaacactccatacataatcgtcatgaagacgggaagtactaccgaacaaacaagagaggtttaaaagaacgaaacacaaaagagaaaaaatcaacataagttgtcttcaaataacttggactctcagataggtgatgatgataatcaaaagcacaacgacgggtgaaggtgttgatgagggctcgtaacttagatgcgccataacagaatctttcagcttaaccggcgattttcctagagtagggattggaaggctgtgtaggtctgaggaacatgtcaccactttctcccacccaccctgccttcatcgccggttgttgttgcctttgactttgagtccatcttcctccaattg

SEQ ID NO: 577 - DNA, 411 bp, Arabidopsis thaliana
ttttttttaagatagaaaagcgtacattatctagtttaatgtcaaacacaagccataggctgacgttcaaagttacaacaagttcacagataataacagagtcgaaggtacatatttcactatacacacgagaggatacacaggagaggttatagttattagagaagggatcgttgttgtgtgaagatgtaaacctcgtcgtaaccaatccctgcgtatccacagtaagtaggcttatagttgtaaatgagattgctcagcactttcttagactctggtctgttcagtgacttcctagcttcactgactagatgatttgcggcgtgctgactcacctggatcgcgtcctcagagtgtggaattttagatgatccccactcgaatgcatttttctcaggatgccactggaag

SEQ ID NO: 578 - DNA, 411 bp, Arabidopsis thaliana
ctttttttttttttttttttttttaaagaaaacaccaagttattgctttattattggaacatatgcttgattatacaatcttggtattagcttctaaattttaattttaatttttttgtagaagctaagaggaagaacttggattctttgtaattggaagctttccatcatatgtgctcttcagtacatctggtttcctcacaacccgaggtcctactggaaccttccgattctttggcctaatatcctgatcaaagatggctgtaggtattgctagtgtagcaacggcattcggagaatcaactatcccagatagtcttccttcacatggacaacatgagagtaagaggtacacctgttcttttgagtaaccaaatttgaaaagatagtctatggcgttgagaactgccc

SEQ ID NO: 579 - DNA, 411 bp, Arabidopsis thaliana
atcctctagagcggccgcccttttttttttttttttttttttgggagaagaaaggatttactatttcaaaataaacatattttctcatgaattacatcattacaagaaatctcaacaaaagaggatgaaaatgttaaagcgaagatgagttttcacttccagagttcttccatggggattccacgctcttgtgcaacatcgcggaactgtctcatctgttgtactgctgcaagagtggctctcgcattgttgagagcattgttgcttccaagctgtttccccaatgcattctcgactcctgccatctctagcacaatcctaaccgctcctccagcaatcacaccagtacctggtgaagcaggtctaagcatcaccttggctgctccataatcaccctctgatctgtgaggg

SEQ ID NO: 580 - DNA, 411 bp, Arabidopsis thaliana
ccgccctttttttttttttttttttttttttacgaaattgcaatgttattaagattggaatcacatcaatggaatatcttcatcctcgtgcccatttctcaattactgagcaataaaaaaaaacatctactggataatttgttctccataaaaaaaaagtcaaacatttctaattacaatttatacgtcggtccatttttctcaaaatgactaaattgaccctactcggcgatcgtgctcaaattagccgtgaatcgcctcttccctttaccgcaacctcttccgccaccaccgtttgtcttaactccggcaatgtttttcttttggtaagttttttccgatgtcgttacatcgtcgtcgccggaaacccaaccgacgccaccgctcttggtcaacgccgaactagctttc

SEQ ID NO: 581 - DNA, 411 bp, Arabidopsis thaliana
  misc_feature (1)...(411): n = A,T,C or G
gcggccgcagagaagagagtagaaaacgggtaacttttccttgttttgactctcctaaaaataatttctcaagtggcaaaaacaaaacgacatttcatcgaattcaccgctcttttaacagtttgtaaactgcacctcagatttcatctcccaaaaactattctctctctttgctctatcttctcttcttcagctactaattgctctgtttaccgttactgccatcgcattccccttcaccaaatccgttacgagcttcttctttcgccttcaaatctaattttccttctgttccgttgctgttgtcagccagttcttgatttgaaccgggtgggaggaacacaccagtgcctgnnntgggcattcgaggttgtggtgctgtctggtgtcgtggatgaggtggcagcagtg

SEQ ID NO: 582 - DNA, 411 bp, Arabidopsis thaliana
tcaattcttcctcctctcggatccatttttagaggagtctagtttcttacttgaacatagacatggaatcaactaataactgacaaccaagaggctgttcttttcaaatgattggtagtagttatattatgcttggacagtgccatgatgggcatctgtgagatgaaaagctgctgctcatggcttcttttgatctcgttgctttgctcactatctaatgaaagtcaagcgattagtcctgacggcgaggcgcttctgagcttcagaaatgcagttactagatcagatagtttcatccatcagtggagaccggaagatccagatccatgtaactggaacggagtgacatgtgatgcaaaaacgaaaagagttataaccttgaatcttacttatcacaaaataatgggacct

SEQ ID NO: 583 - DNA, 410 bp, Arabidopsis thaliana
cttttttttttttttttttttgcagctaaaatcacgagtttcttatagtatcacataagaaaaggttccataggttctctacagtgtcagaacttataaggtcctatgccaaatcaaatcgcaaataaagcaccttaccactgtgaaataccttttaacattgtgacacaaaaattacaaacctaacaatcaaacatcattcagtacttgctatacttacaaagttagggttcttatacttacctaaaccctaatcccccgagggttgttgaaccaatcacgattcttggtagttcctaaggtcaaatgacattgtacttgagcaactcctctcggtgtctctgtaaactccaaccagagcctccgccttgtcatagaagctgtccttgagagatattacaatgctttgg

SEQ ID NO: 584 - DNA, 410 bp, Arabidopsis thaliana
  misc_feature (1)...(410): n = A,T,C or G
tttttttttttttttttctctcgcaaacagaaatttatattgacttttaagaacaaatacaaagtatatctatcacacaactcacaaaagagataggtacaaacataatgacaaatcacaatcagcacaccattacattaaaagtcaaatttacctttttaataagaagatacaaaaatatataaagagaagaccaagacaatttgacttgagtgattaggaggcattgttggcctgnnntaatccatttcgaatctgcgttgccacgtcagcgacggcgcctggaccgtgagggataaacaccgccgangctttagaagttgctccgatatctctcattgtgtcaaagtactgagtcatcatcaccatgtccaacacatccttcgctgacgtccctggcacgtttcctg

SEQ ID NO: 585 - DNA, 410 bp, Arabidopsis thaliana
cctttttttttttttttaatacttctgaaaatgatttattttctggttaataaaaaacttagtcccaagaacatgtttatagctatctgttttctatttattctctttggtctctatacaaaacatggaactgttctgggacttctttgtaaaacctactatctatattcaaaaatattacaaaaaattaccaaaaaacggttccatcttccagaaaacaaaaacaaagaagaggaaagatccgaacaccaaaatcttgacgaatcttttaacgaaacagatcagatgagagttgtagattctgataaacccgttgtcgccttaggtactttcttctccagcattgaggttcctttgaatattgtaagctgcacttccttttggtactcctgcaattgctggtcagacat

SEQ ID NO: 586 - DNA, 410 bp, Arabidopsis thaliana
cgcggcggtgactgattaccggaagaagctccttcatcacaaggagctcgaatcccgtgtccgaacagctagggagaatttaagagcagctaagaaggaattcaacaaaactgaggatgatttgaagtctcttcaaagcgttggccagattattggagaagtactacgtcctcttgataacgagcgattgattgttaaggcaagtagtggccctcgttatgtggtgggttgtcgtagcaaggtggacaaggaaaagcttacttctggaactcgagttgtcctggatatgactacgctgacaattatgcgagcccttcctcgtgaagttgatcctgttgtttataacatgttgcatgaagatccaggcaacattagttactcagctgtgggtggtttaggtgatcagatca

SEQ ID NO: 587 - DNA, 410 bp, Arabidopsis thaliana
cccaccgggtcatcgtttcgacccggatactatactaattgaggcgtattttgacccggtttgcccggacagtagagactcttggccgccactgaagcaagctcttcatcactatggatctcgcgttgcccttctcctccatctccttcctttatcctaccatgacaatgcctatgtagcatcacgggccttacacattgtgaataccgtacacgccaatgctaccttcagtttgctggaagggttcttcaagcatcagtcattgttttacaacgcgcaaacacaactcctttcaagacctgcagttgtggagaaaatagtcgaacttggaacagtctcgttggggaactcatatcaatcggttcttaaatccggcttcagcgacaaaaaatcggatcgtgcaaccagag

SEQ ID NO: 588 - DNA, 410 bp, Arabidopsis thaliana
  misc_feature (1)...(410): n = A,T,C or G
caaaacccatggattcttcaatacccgacccgtttaccgaaaacccttcaccaccatcacctccgctttaatccccgcttcaaaccgtcaagctccaccaaaacaacaactctatcaaccattccgtccaccaccatcaccaatccctccaaagttccgatcactcgacaccgccggaaaaatcgaagtcctcgctgatcgtctcggtctctggttcgaatacgctccactcatttcctccttatacactgaaggattcactcctccatcaatcgaagaactcaccggaatctccggtntcgaacagaacagtctcatcgtcggcgcgcaagttcgagactctttagttcaatccggtgccaaaccggagcttatagctgcgtttgacacaaatggagccgagcttctct

SEQ ID NO: 589 - DNA, 410 bp, Arabidopsis thaliana
agttatattacagagacaaagcagtaacactctctccttcagaaccaagactcagcaaacacaagccaaatcaaaccaaagtgaactactctatatactcgataacaagaaacaagagaccaatagtccaacagactaaattgtaggaacaaagagagtcgtgacaaacatatactcattgatgcttcttgattgatgatgaagcacttgtccatgcttttatgagcttggggaaatcaaactgcgagcactataataacaatcatgagcacgataccaaaaatcaccaagagcaagcacgtcagagaagaatttgatctttgtgtctttgatgccttacgagatgggattttccttgggcagttgcagcgtaagagttatcgatgtgagtaccaatatcatctatcatg

SEQ ID NO: 590 - DNA, 410 bp, Arabidopsis thaliana
aagatgtcaatgatgagcagaactcgaagcagcatcgccatgggaacaccatctttccttgagttgaagaaacaagcttcatttttcttcaaagagaagcttaaaacggcgcgtttagctctcaccgatgttactcctcttcaactaatgactgaggaagctacggatggtgagtcatgtggaccaaatacacaaaccttagggtccatttcaaaggctgcttttgagtttgaagattacttggcgattgttgaagtcttgcacaaaagattggcaaagttcgataagagaaactggaggatggcttataactcactaatagttgttgagcatttactcactcatggaccagagagtgtttccgatgagtttcaaggtgatatagatgttatctcccaaatgcaaacctt

SEQ ID NO: 591 - DNA, 410 bp, Arabidopsis thaliana
cttttttttttttttttgcaaaattttgaaactatataagagcaaatcttacacggtcccaaaaaaattaccttgttgatacatatggtacaactggtatttcttcaaaagttttaagcctactcgtccgtggaaaaatattgccacgctgcagcagctcctgcaactaatatgatttttaagataagtttactagacaagaccgaagattcagcttctgatgatgatggtgcttcaattggtctccctctaatcttggctgtgattctcgataataactgcttaagcccacctgttttctttcctgcttggcttttgagaaacctttcttcttcaccaattcgtctacgtagaacatttagcaatgatccaaaatacaatgcgaagatggtgcatgtgatcgtgattac

SEQ ID NO: 592 - DNA, 410 bp, Arabidopsis thaliana
  misc_feature (1)...(410): n = A,T,C or G
taatggctcaaagagctctgagtagaaaaacttttgggaagttcattgcgcagcacggttcttcgtctctgatcttgcaaaggtaaacgacactgcttttatctcccaattgcttcttatgttcttcttatatgagtggttgtctgatacagttacgggtagagctagaaggaacccgattgttggttctagaagctgctgatcatcttgataaatttggaaacaaaaaagctcgaggaattctcgcaatggccaaggttgcagctccaaacatggcattgaaggtactagacacggcaatacaagttcatggagcagccggtgtatcctcggacacagttttagcgcatttgtgggntacagctagaacactgaggattgctgatggacctgatgaggttcatcttggg

SEQ ID NO: 593 - DNA, 410 bp, Arabidopsis thaliana
ccacgcgtccgaatttcctcttttttattgttctttgattgattaagtttttgtggttctgtttgtataagttcaatatgacaacaactactgtcatcttgatgttcttatggtgtgctgtttctctaatgtttttggtgaaacagagacacaaattccagctcaagtgtaataagatacatgccaggtaggtttagtgtctaaagacgaagccgttcgaatggctgatgatgctgaacttgatctgcgtgctacaatcaaagtgaacggtgaatacgcatacggatacgccaaagcagaagttggagtacataggctggtgcgtatatccccgtttgacagtggaaaacggagacacacttcgtttgcggctgttgcagctattccaattctaggtgatgggtccaccc

SEQ ID NO: 594 - DNA, 410 bp, Arabidopsis thaliana
ccttttttttttttttttttttttttttttttttttccaaataaagttgggaacattgatatatatgataaaactggttacacaacatacatatattgtctgcaaaaaacacaagcattcattaacaatattctgcaagccatcttagtatgttttaataggccttaaaaacacgtatagcataagtatgtttaatagagaagaagaaaacacaaattgtaaaagacaatgttatataggccttttgagtggactgcaaagtttgtaggcaaaaccataaaaacttcaacgtctaggtgttcttctggttttaaagaacctttctctgattgagatcaactcttttgcgacttcactcgttgccaaccggttcgtaggatattcttcacagcacctaagtcccacctcca

SEQ ID NO: 595 - DNA, 410 bp, Arabidopsis thaliana
ccacgcgtccgtgctttgattatacaagtgcttctctttgttgcatttcttgctctcacggttctcaccattggtgttgtgtacattggagtgactgagtttcttgggaagagggagagagagaagtttgagaaagacgaggcagcaaagaagtctaagaaaggtgggaagaagaaggcaatgagagccagagctggaccaagaggttttggtcagaagattgaagatgatgacatcgacattgatcttgagtgattttgtgtgtagtagagagacaaagattgattttgtttgtaatgttgctcagtgattgtcacatctatgatatgtttcttgtgtaccaagcaacttgatggtcgatataacaaaaatattgcaatattacagaaaaaaaaaaaaaaaaaaaaaaa

SEQ ID NO: 596 - DNA, 410 bp, Arabidopsis thaliana
ccacgcgtccgcaagtaatataacttaactatctctcctctcttttcttaagataacttctctctctctattcgttggtataaaaaaagaagactaggaaaatgacggagtggcttccggtggtggtcgcgacggtgttgtttgtggtgctgagcccgggattgttgtttcaggttccgggaaacaacaactttgtagacttcgggaagatggaaacgagcggatactcaatccttctccacgccttcctttactttggccttgtcactgtcttcaccgtcgtcatccactttccgggcacttaattctatgtaatctttacttacaaaaactttttcttcctatctatgcttttaccttttctatattatcagttataccatgtttcccgtgttcaaaaaaaaaaaaaa

SEQ ID NO: 597 - DNA, 410 bp, Arabidopsis thaliana
gattttttcgtatattattagattcaaccaactaacaataacagctttctcatttacagctaaatctcttttaacttcaataaccaaaagtgactgtgaaagtgtgaaacaagaaaagaggaaaataaaagcagagtagagccatcctaaacgtaattaaaccaaaccagactttgccacatatttagtcagagactaagaataaagaacacaaaagtacatgacaagatgcgaagtcttgcttctgtttaagagatgttcatagcttcagcatgatagctttcgagatctttgtcgagatccgcagcagacttctccactggcttctttccacctcgcccaccgcttttattccctctgccaccaccattaccccggcctctaccacggaacccgcctcgaccagctgt

SEQ ID NO: 598 - DNA, 410 bp, Arabidopsis thaliana
attgcacgtgcctaggtgcacgccggcgggcccgacctgtttaacgatgtgtgtgggttgaaacaaaatatgagaaaaatccgaaagctgtggcgtttcgtgaggatacgtgttgtggtttcgtggagcgtaatctcgagtcgggcggggcaaggccggatgtggatgtgtatgagcagtcgtcggcatggatctaagatccacaacaacatacaaccaaaattacatcagatcgatatcctacaacaaaagtctcctcgacagcagcaacattcgttaatcaccaccagtttcctgcgtgatagtcattatatgtatagggacaacaacaacgatggttcattttgagttagtgatttgtaagaaagttttcgtgaacattatctaatttatctgatggttaattacta

SEQ ID NO: 599 - DNA, 410 bp, Arabidopsis thaliana
tttttttttttgaagctaaagtagcttttatcattaaagaagaagaaggaagttcagaagaatcaatcactaatgcaaaaacaacacaaatacttaaaaggttgaaacttaaacagagtttacaaatttatctaacaaatgccctggaaaatttatcacctttgaggtgaagaagataaacttaaaaaaaacatctgagaatcatcaaatcaagcaagattcagtagtctacatcttcagggttattttccagtcacacaaccattcattaagcgagaatcggtttttgtttcatagcttttgatatcgtaattcttgttcggataaagggtttcaaggcgcaggtacctttttctcatctccttcggtagcagcggcttcattggaacaatggttcttgacaactgttg

SEQ ID NO: 600 - DNA, 410 bp, Arabidopsis thaliana
ataaactgttattgcgcctactgatttaatttgagaatctcatttacaaaaacagcacaagctatcacaactttacaatccaaaataacaagagatatgtcaactaacttaactgacataaactatttttacctttgaatctgatccgaacttgagttgttagccgctgatgaactagacggccgtccattttcagtccctgctttatctgaaccagctgcgacgccaacaccccatcttctagaaagttctgatggctcaatcactttaaccgaaccatcagacagtccaaccgctaattgattcggttcttgtggatgagctgtgatcacctgtgggaaaatcggtgcactgtttggtgtaggttgaggcatgtaggctgatggggcaatgcggcatctgagtctcaa

SEQ ID NO: 601 - DNA, 410 bp, Arabidopsis thaliana
ccgccgactagtgagctcgtcgacccacgcgtccgtgaacctgtttctggatctcttctttacggaaacaatattatttccggtgccattattcctacttctgcagctattggattgcatttttacccaatctgggaagctgcatccgttgatgaatggctatacaatggcggtccttatgaactaattgttctacactttttacttggtgtagcttgttatatgggtcgtgagtgggaacttagtttccgtctgggtatgcgtccttggattgctgttgcatattcagctcctgttgcagctgcgactgctgttttcttgatctatccaattggtcagggaagtttttctgatggtatgcctctaggaatctctggtactttcaactttatgattgtattccaggctga

SEQ ID NO: 602 - DNA, 410 bp, Arabidopsis thaliana
gcggccgccttttacattattctgcttattcccaaaccctttcccaaatcaattgttgcgtttaacacaacaaagccgttacattttccaatcgctgaatcatctaaccgtagacaagttaccggaatatgtttctcctttataagccgtcttcaagaatcatagagctcaatatcccttgaacgaactcgctctgtttcaacttttctctgtgatcctctgctgaaagagactgcttctcaacattcctttcaggcaaactctgattcaatgttttcttggcagaacttgtgtctgcacatagacttgactcagaaatgaaaaagtcatcagccattggtgaaatgaatgaagacagtaaaggatcagcagctatactggcagaagaagaggatacagcacgtgatgtt

SEQ ID NO: 603 - DNA, 410 bp, Arabidopsis thaliana
  misc_feature (1)...(410): n = A,T,C or G
cctctagagcggccgccctttttttttttttttttttttgtttttttttttttttgtctcaataatgttcaataatagataacaaaaattctacatcaatacacaacatgaaaannacggacaacgcaaagaaagttcagacgcgtgttaaccgccaaatcagatcagcagtttccgttttctttctttagaatccaatgagccagaataaacgctcaagctttctcataatacaacattcttcagactatacttggaggatctccagaccagctacaagcggcacgcgaccaccgagttctgatacaatccaccagtggtgcatgttggaccggttttggctgattcacttctgagtctttctcagagctgctcggcggcagttcacatgtcatgtactcttctggtgt

SEQ ID NO: 604 - DNA, 410 bp, Arabidopsis thaliana
cggccgcgttttctctctctctgtctgtgtctcttagaatgcaatcagctatggcgctttcgttctcccagacgtcgtttacaagaccaaaccacgtgctcggatcatctggttctgttttctctacgcccagaagtctccggttctgcggactccggcgggaagcgtttggtttctcaacgtcgaatcagttggctattcgcagtaaccgaatccaatttctaagtaggaagtcattccaagtctccgcttctgcttcaagtaatggtaatggcgctccaccgaaatctttcgattacgatttgatcatcatcggagctggagttggtggccacggagctgctttgcacgccgttgaaaagggacttaaaacagccattattgaaggagatgttgttggagggacttgt

SEQ ID NO: 605 - DNA, 410 bp, Arabidopsis thaliana
ctgtctcaacgattcctagattccttcaagtttcttctagttcgttgcttgatggtcgagtcactaatggatttaatcctcacttgagtgctcatttctttggtgtttacgatggccatggcggttctcaggtagcgaattattgtcgtgagaggatgcatctggctttgacggaggagatagtgaaggagaagccggagttttgtgacggtgacacgtggcaagagaagtggaagaaggctttgttcaactcttttatgagagttgactcggagattgaaactgtggctcatgctccggaaactgttgggtctacctcggtggttgcggttgtctttccgactcacatctttgtcgcgaattgcggcgactctagggcggttttgtgtcgcggcaaaacgccactcgcg

SEQ ID NO: 606 - DNA, 410 bp, Arabidopsis thaliana
  misc_feature (1)...(410): n = A,T,C or G
ctcgtcagccggtccgtctcaagtagctcatcagctcgcccgtctcaagcagctcgtcagctcacccgtccgaagtatctcgccagccggcccgttaaattttcccgatggagattcttccgattccggcggagagtttcaaggtaggattcatcggagctggtaaaatggcggagagtatagctagaggtgtggttgcttccggtgtgcttcctcctaatcgtatatgcaccgccgttcactcaaatctcaatcgccgtgatgtcttcgaatcctttggcgtcaatgtcttctccactagcgaagaagttgttaaagaaagcgatgttgtnatattctctgtgaaacctcaagttgttaagaaggctgtcacagaattaaagtcgaagctttcaaagaataagattctg

SEQ ID NO: 607 - DNA, 410 bp, Arabidopsis thaliana
  misc_feature (1)...(410): n = A,T,C or G
ccacgcgtccgctcacttttcctagttttgcccttcttttagctcatcaacagagagagagatagatccatggagggtcttcaaagatcaacaatctctttccgccgtcagggatcttccggtatagtgtttgacgatcgtctcatcgccgaactcaacaaatcgggaaacaacgagcagaaagacgaaagtcaacgcgacgaacaacctaagcctatgtcggaaagctctgnncaggtcaaaccaatcgatgagaaagacaagcttagaccgattaaaaccggtggaggagcaccaggaggaatagagaggagtcgatctaacggtggaggagctcaacgacatcatagaacaaccggaagagtttctccggcagtggacccgccgtctccgagaatttcgtcatgcgg

SEQ ID NO: 608 - DNA, 409 bp, Arabidopsis thaliana
ttttttttttcaagaacgaattacgtgaaataaaattagaagatttctcacatgaaaccacattctgatgcagaagggagaagaagaagaagctaataacatcaacaaaacaatgttcataatgggtatcttttttcttttcttggttatagaggaagataagaagccttcttcgcctataatacacactatattccggtggtgggcactaagttgaattttaaacagagcaacctgaacacaatgcataggaccagaatcttgagttagccaactgtgacttttcacttgtgggtgcctgcagctgctgattgagatgagtctgtgtccagtgatcacaggaaatagtctggagtccttcgggtgacgtctggttctcctctcctcggtgctggttcaaactggatga

SEQ ID NO: 609 - DNA, 409 bp, Arabidopsis thaliana
cggccgcccgggcaggtaccaacgaagaacaaagccgattcacaagctttttcgatctgctctttccaactaccatgccttaagttaatcgcaatcggagtcttattcttcttaacaaactctttccccaacagcttcggcaacatcggcattagcctcctctccgcgaaatacaactcgaatcgcttctcctcctctaatttgcgtaaatcggatttcaatttagagactttaataactgtggtgattggaatcttctctgcttcgatcttcttcaaagccgcttcctttgtgattttgttcttgtgtttgtcgtcgatgatcaaacagagctccggcggatcttcggcgaccagatcgatgagaggatgaggaagagggatcgtcaaggggttagtacctcggccgc

SEQ ID NO: 610 - DNA, 409 bp, Arabidopsis thaliana
tcgagcggccgcccgggcaggtcgccttcaaataaaaataaaaccctttattttctctctttcagccgccgcctcctcccactaaactcaaatcctctcatagtcttttcaatcaaatctgctcttcttcactgttgaagctggctatcaaaactcacaataactatgggaccgatgatgatgagagcagaagaagataactacaatctaaatcctccaccatggctaatcccaatgctaagagcaaactacttcatcccttgttcaatccacgccgcttccaacaaaagcgagtgcaacatgttctgtcttgactgttcttctgaggccttttgctcttactgtttgctcaatcacagaaaccatcgtgtcctccagatacggagatcatcgtacctcggccgcgacc

SEQ ID NO: 611 - DNA, 409 bp, Arabidopsis thaliana
tcgagcggccgcccgggcaggtaccagcatcatgccaacctaatctaacctatgattcaacacaacacaacacataatatcaaaatcgatcaatcgaatcagagaagtgattagtgggagtgagcaaaccaaaatcggatggcagaatttggtgttgagaagctctttgatgtcttctctagcgttcttcaactgatcaggatctgaagatgaagatttagtagcggcggtggtggagttgaaactccgattcaccaacgcaattcgatatttcttctgagagagaggtgaagaagaagagagacgtggagaagagacgagagatctgacgaaggagagagaggaggaagcggagagagtgagagtggatctggaggaggaggaggaggagcggaggagaagagaagcg

SEQ ID NO: 612 - DNA, 409 bp, Arabidopsis thaliana
tcgagcggccgcccgggcaggtgcaaagttctcagcaaaatcaaagaagaaccgaacgagagagagaaacgaattcttctcaggtgttaaagaatgtctcggagatatgatagccgtaccacaatcttctcgccagaaggtcgtctttaccaggtagagtatgctatggaggccattggaaacgccggttctgcgattggaatcttatccaaagacggtgttgtgttgatcggtgagaagaaagtcacctcaaagcttcttcaaacctcaacctctgctgagaaaatgtacaagattgatgaccatgttgcctgtgctgttgctggtataatgtctgatgctaacatacttatcaacacggctcgagttcaagctcaacgttacaccttcatgtacctcggccgcgacc

SEQ ID NO: 613 - DNA, 409 bp, Arabidopsis thaliana
ccacgcgtccgcttcttcttcttcttcttgtctccgatgtcagccatggatgttatgattcactcttcaagctttctcctcccttgcgacgaaactagtacagggacgagatacgctctcgttgttctgaaccagagtttgccacgattcactcctcttctctgggaacatgcaaaacttcgtctctgtgctgatggaggcgctaatcgcatctacgacgaattgcctctcttcttccctaatgaagacgctttggccattcgaaacaggtataagccggatgttatcaaaggagatatggattctatacgtcgtgacgtcctcgacttttatataaacttgggaactaaggttatagatgaatctcatgatcaagacaccacagatcttgataaatgcattttgtata

SEQ ID NO: 614 - DNA, 409 bp, Arabidopsis thaliana
tcgagcggccgcccgggcaggttgattccgtcggagctgatttgcgggatcttattttgttcctgtacattcaatcgtataagaagttgcttcctaggacgcataaggactccgcagcggtggctgatgtttggccatcgacttcagcttttgatggatacttgtcggcattatctccaattcagcttgttcgtagcaacagccgtcggtttatgccatcaccgacagatgaagaagctcatcaattatcgtatctgcaaaagcacattgcaaatattatttctctccttgcagagcctgtggagggacaaggagatgattctttggtcctgtctatggagagtttggagcacattgggtttcttgttcattatggtgataagggatttgatgtacctcggccgcgacc

SEQ ID NO: 615 - DNA, 409 bp, Arabidopsis thaliana
caaacaaacaaacaaccagaagaagaagaagcattgaacgtatcacttaaaacactgatttattctctttccctcttcttatttcaacggcctatgtggaaagtttttgattgagaatccaaatcacacattacatcaaatcagaactcattatgagtcactaacgagttcagacatgtcgcggctgatgctgttctcatgtgtggacaatggagttccagatataaaagccttgaagagcgcaagagcttgcttcggtctgtgcaaaggaacttcatggcctgcacctctcactgtcacaaagttcagaccagcatactgctgactccaccctcccacctgtccatctaagtaccaaggaccataggcactcaaaggacgaaggtttagtgcatcgatactgtaccgg

SEQ ID NO: 616 - DNA, 409 bp, Arabidopsis thaliana
tttttttttgagctaatgaagttgtgacttaacaagcaaaatcgctgtcgtatacaccatgtgtaatatctcttctagttttcaccaaccaagtattaaataaccaacaagaatacaacatcaagcaatagaaggattgggttttccggcgatcagtaaagtattttccggcgagatgcttgccgggatatacttcactagctttgaatttaatccatgtttcttaacccacttcatcctccctgcatcgatgatctgtttgcatttgaatcctaaaacagctctttccatgggtttcattttcttcacaacttcctccacgctgatcaaagaagcatctcttacttctccttcttcctcctcctttgcatttgaatcaagaaggtcaatgtcatcaacaccgggaagc

SEQ ID NO: 617 - DNA, 409 bp, Arabidopsis thaliana
gcggccgccatagttaaaccagagacaaggctgatgaacaaatcaagtaaaaagggccacaaatattgaaaaaggaatccatgttttccaatgttaacgattctcaccccttactcccctagttatctcattgtcttgtggagttaaattaaaacgctaagagatcagctggagaagtcatcatttgccacatgagctgatggaattatggcatagcatccagtactgtctcaatggcatgtggagccatggcctcggaggaggaagatcaagccccagttttgatggcattctcttcccactgaggactccgcgagctgatgttgtcagagaagaagctgatattcctgaaaaaattgttttatagtgaggcaaaagaatctaaggttagaaaattgctgcgaagatt

SEQ ID NO: 618 - DNA, 409 bp, Arabidopsis thaliana
ttttttttttttttttttttttttggagatgtaaaaaagtgaaacttgttcataattcaacttgatatccagacacccaaagacaaaacagattaaaaaaaccaaaatcttttgactaaaatatggaaagtgttccaaagcagacgagattattactggctagcaccgagccatttggtgaagttatcaaactcggtgtaatcactgtcggagatcatagtcttgtaccacgacttgcctgctgctttgattgccaacgcctcctccttggtaacggttttcctcttcttggcgagcttctccttcttagccttaactctctgtgcttcagctaacagtgacatcctcttcgcggtcttagcataaggattcaacttcaacatcacattgagattcttcaatggattct

SEQ ID NO: 619 - DNA, 409 bp, Arabidopsis thaliana
ctttttttttttttttttttttttttttaaaggaagaagctttattaatgagaattatccaatgaaagatcctccatttacttccttatataaacaataatataagcaaatccagctaaaatcactcttaaaccataagaattcttcttgtctatttttttgtttccatttctagcaaaacattcttcattacccataagacaaatcaagcttagcagcataagataaagactcaataaaccctaaccacaaactgagtttcttcctgacgactcataccccaatcacaaaccacattgttcttctactcttctcattatctttgcttggggtatgcaaaacttatggaaaaatgtcaggaaaaactacgaaaaattgaaaaacaagaaagacgaaaatggtagaaaca

SEQ ID NO: 620 - DNA, 409 bp, Arabidopsis thaliana
cacagtacatgccactggacagccaacctgaggtcccgaaccacacgaatgatgaacgtgcctaagagaacgaaatggtccatctatttattcccccggaaaggaatcaatgcgaagcgttcttttaattgatgtggcccttgataccggtgttctttttcgcatctgtatctctgtaactctttgtaccaaacagtgtatcctatgttcttgtcaattgtgtccatgtgacttctgtaatagggaaacttcgatgtagctacggagaactggacaagctagtcaatagaatcaaaacatcaaagtgttaaagttaaatcttttagtcttggacaagttagacgactctctctttgtagtttacacataatgtcttaagatttatggtaaattaagacaacatcagatc

SEQ ID NO: 621 - DNA, 409 bp, Arabidopsis thaliana
ttgcgagttttagttttctaatacaaaatcaaagtatcagaacgttctttgagaccacaacgcaagaatggagagagacaaattcgagcagaaaccaaaaaaaaaaaacaccttaaaagttcaaaagatttgtcagacttttttttaacaaaaaccagaaaaggggattttaagaagatcaatactcccacttcttgagctccatgccatctggtggagtgctctccactttcttagtcccaacttctttccagtttgtcgacagtaccgtcccattcgactctgcaaatgatttgttcattgcccgcctcatgtcttcatctgcactcgagtatatgtcgctgaaaaatttgttcatagctgcatctccatcaagcttctcatccttctcctgtttcttcacttcagc

SEQ ID NO: 622 - DNA, 409 bp, Arabidopsis thaliana
ccctttttttttttttttttaagctcaagtgtattatcgtatactttacacaacccaaccagaatagtaacaaagaacactaactcgtcttcacaactgtcttttatatgtaatgtatgtgtttggaaaagaaaaaaagtatgtatatcgcttggaaattgcacatcccgtcaaagaagtggctgctgatccactccactcatgcctctagtttagggcagattggggagcttggattcgacatagaacatatatctgctagacaaggttgcttggtggctacatcctcctcaaaggccggaggtgcttgcccgtatatcatctcgcagctcatgtcttcataatttgggttcatggtgagtgggaggccaaactcattggtgaagaaatcttgggttggaatcttgca

SEQ ID NO: 623 - DNA, 409 bp, Arabidopsis thaliana
atactatggaccctgagagtatcatggctgctgatgggactgattctgctcctgcaaatggtggtttagcaatggaaaatgtatgtgttaaagaaaatggggctgtttctgtcgaaaccgtggacactacttcagaaagtcagaatgagaattcggcaaacagttccactttggatacaattgaacacgtcaaggaggcagctgagggcacacaagttgaacatgtagatgattcaaagtgtatgaaaggcgaaaaagctcaacggaagccaaggcatgagaaactatcaggtggtaagaataattcatcggttcacatcaaaaagagcaaagagggcaaaagtgcagatgctaaagtggcagcatcaaatggttctgttgctcctaatgtacagacaacaaatcctct

SEQ ID NO: 624 - DNA, 409 bp, Arabidopsis thaliana
ctgaagcttgtaaagacggtaaacactgtaaaaggaaagtctgtttctttgctcattcgccacgtcagcttagggttcttcctccggagaacgtttccggtgtctcagcgtcgccttctcctgcggcgaagaatccatgttgcttgttttgtagcagctctcccacgagcactcttttgggtaatttgtctcatctttctcgatctccgtctctgtctccacctatgtctccggctaataaagccgctgctttttcacggttgaggaaccgcgccgcttctgccgtttccgccgctgcagccgctggttcaatgaactataaagacgttttgagcgagcttgtgaattctttggattccatgagcttagcggaagcgctgcaggcgagttcctcgtcgcccgttacaac

SEQ ID NO: 625 - DNA, 409 bp, Arabidopsis thaliana
aggcgtcccccgtaccaaggatgtggtgattgatattgctatgaaatggacaaaagttttaagaacaggagggataggagtaagattcatggctgtagatcgaagcacagtgatgttcaatatgcaaaatgggaagcttgtgactgagctaagggaattcgtgctgagccaagaagaagcttacgaggtcaagatagggaagcaagagtttagaagacctggagatcctccatttgaagatgtctttgacaaatttcaagctgagcaaaggaaagatcacgaagatggtgatggtaacaagaatgatcttactaaggatgaattataggtcacagaaaagcttctataatgggtagtactgaaagttcaactcttttactgaatcttacctaaacatgtttggttttta

SEQ ID NO: 626 - DNA, 409 bp, Arabidopsis thaliana
gactcctctgtatctgaagctgagcaaagcctggagagagagttatcgttcatacacaaagcgaaagaatcaggggtggtgtatcttctcgggcatggcgatataagagcaagaaaagattcatggttcatcaagaagttagtcataaactacttctacacattcctgaggaaaaactgcaggagagggatcgcaaatttgagtgtgcctcagtcgcatctgatgcaggtcggtatgacatacatggtctgagtatcttctttcttcttttaaacgtagtttctattcgtgtccatagatctaaatttgtatgttgcgttgatgttcttgcattgttgtgaagaatccgagtatttgactactccaatctatagagcatctagtagaggaaaaagctgcctatgttgat

SEQ ID NO: 627 - DNA, 409 bp, Arabidopsis thaliana
gaaaaccttgtgagactgacccctcttcagagcaacgctacgggggagagttctatgtaccaagagacgaggagttctctacagccaagggcacttcattcacaggcaaggccgtactggcagctcttccctccatcttccctcagatcgagtctgttctattgagtccccaagaaccttttccacacttcaaggccatacaaaatctctttgaagaaggcattcagcttcccaaggatgctggcctcttacctctgctccccagaatcatcaaagctcttggcgaagctcaagatgatattctccagtttgatgccccagttctcattaacagggatagattttcatggttacgagacgacgagtttgctcgccagacacttgccggccttaatccttatagcattca

SEQ ID NO: 628 - DNA, 408 bp, Arabidopsis thaliana
cttttttttttttttttttaatagaacattcttcttttatttaagttaattaagggtaataaataacattcactgctaattcttaagaccccaccccaaataaagagtacagagtatatatatttctacaaatacagagcaattacaggcaacgatttgtcttcttgtctgattcacaacaagaacagcagaaactgatagttgttgtggtgtttcatttgagctccaagaaacttggatttggattgtaagagttatctgatgaagaagacattgaagacacattaatgggatatacctccgttacttcttcagtcttctcatcaaagtagaccacatcttgcattgttagctggtgatattcgacgactcctctcagatagaggttttcgcgggtgtatatcgagt

SEQ ID NO: 629 - DNA, 408 bp, Arabidopsis thaliana
cttttttttttttttttttttttcaactcaaagtttaaaccttttgatggattatagttgacttacatacaacgacttaatacgaggaaatacagtggatataatgatacagtatattatgtaatatgaacaaatccttgtaccagaaactctcaatctcttgttttctccaatgcgttaagtttcagagcagcactgttgaggcaatatcgttttccggttgggcgtggaccgtcgtcaaagacatgaccaagatgggcgttacaaacagcacagacaacttcttgtctaggcatgaagatgatagagaggtctagctttgtcttcacattgtttccaattggttggtagtaagatggccaccctgttccactatcaaactttgttgatgaatcaaatagaggtgtg

SEQ ID NO: 630 - DNA, 408 bp, Arabidopsis thaliana
tcgagcggccgcccgggcaggtctttatacgtataataacatcccttgtgatcaaacaagtaaaccattcaaaagatgaaaggaagaattttgagtttgagtttgctcataatgagtctggtcatggcacaagttcaagtagaagcaaagatctgctgcccttccaaccaagctagaaatggctatagtgtatgccgtataaggttttccaagggaaggtgtatgcaagtgagtggatgccaaaactctgatacatgccctcgaggttgggtaaacgccattctcgaaaactcaggtgatgctaccaatgagcactgcaagttagggtgtgaaacttctgtgtgtggtgccatgaacactctccagaactctgatgcaagtgaaattgtgaatggagcgtcggaacaa

SEQ ID NO: 631 - DNA, 408 bp, Arabidopsis thaliana
catctaaaacaatttcgatccatttacacataaatatatgtaactggccgtagaagaaacacattgaaggaagagatggctcataggagattaatcatgacgatgacaaagatgatgatgatggtgaccatgatgatgatgatgatggataaaacatgcatatgtgcggacatttccagaggcagttttccaaagggctttgtctttggaactgcttcttcggcttttcagcatgaaggagcggtgaaggcagaaggcagaggtcctacgatatgggacacattttcccacacttttggtaaaatcaccgattttagcaatgctgatgtcgctgttgatcagtatcatcgttacgaggaagatgtacaacttatgaagaatatgggaatggacgcttacagattttcc

SEQ ID NO: 632 - DNA, 408 bp, Arabidopsis thaliana
tcgagcggccgcccgggcaggtaaacaatccaggattcttcagattcctctcctttgatcctctctttaacaatctctctctctctgttttcttcgatccgttgtaggagaaaatggtcgttatcaacagtctccgacgcttggcgcgtaccactcaggttcatttgcacagtaggtatgccacttgcatgtctgggaactccacttccaggaggattttcactactgaggcagcacctgagaagaaaaacactgttgggtctaaagggcatgatatgcttgcaccttttactgctggatggcagagtgctgatttagatcccttggtcattgcaaagtctgagggaagttatgtgtatgatgatactgggaaaaaatatcttgactctctcgctggtttatggtgta

SEQ ID NO: 633 - DNA, 408 bp, Arabidopsis thaliana
ttttttttttttttttttttaacccaaagattcaataagcataacaataatcgatcatcccaaacaaatatgtctttagaaagtagagatctcaacttctcaacttatcacataaaaaaagtctcctgaaaacatgcattcttaaacaaagtcttccactagtagcatgttgttctctagatagatagatatttcttgcttaatcgatggataggcgtggaacacaaaagtccacaagcagcacagatggccctacgcccgccaaataaaacatcctgctcaaagccactttgacaactacaaacttcttcttgtaccataccttcactattgccatggactttccttggatcttctctgttccaactactatcccatctctaagtccaacgtagcgcgcatactcac

SEQ ID NO: 634 - DNA, 408 bp, Arabidopsis thaliana
ccacgcgtccgagacgatgacgacattcatggctcctcctccagcagcgacttcccttgccttccatcctcaagacaataatataattgctatcggaatggatgactcttctattcaaatctacaatgtcagagttgatgaggttaaaagtaaattgaaaggtcatcagaagagagtgactggtttagcattctcaaacgtgctaaatgttcttgtttcctctggtgctgattctcagctttgtgtatggagcatggatggatgggaaaaacaagctagcaaacagatacaaattccaagcgggcattcaccaaatccacttgctcatacacgcgttcagttccatcaagaccagatacatgtacttgttgtccatgccagccagttagccatatatgaggctcctaa

SEQ ID NO: 635 - DNA, 408 bp, Arabidopsis thaliana
  misc_feature (1)...(408): n = A,T,C or G
ttcgagctccgtaagctcaatcgctgaagaaccgccgccaaagaaacagcatgatccatcgccgtcctgttcatcgtatctgttactacttccagacgaaatcattctgaattgcttagcacgcttgccgaaatgttactacccggtgatttcactcgtctccaagacctttaggcgtctcatagcttcaccggagatctacgttgaaaggtcattacttcgccgcaccgagcgtgtcctttatgttgtgcttagatctcacgctacagaaactccccgatggtacactctcaatttcaaaccctttggaaatgattcaaataaccatagattgnttccgattccgtcgnntnnntcgattccttgctggggaatgtcaattgtcgctattgattctgaaatttacgt

SEQ ID NO: 636 - DNA, 408 bp, Arabidopsis thaliana
  misc_feature (1)...(408): n = A,T,C or G
agaggagtacgagactcccactgctgaaatgctcttccctcctacaccattgcagactccccttccaacgccgcttcccggtactgctgataactcatccatgtataacatccctaccggctcaagtgattatcccactcctggaactgagaatggagtcaacattgatgttaaagcaagacctagtccttatatgccaccgccttctccgtngactaatcctagacttgatgtcaatgttgcttatgtggatggccgtgatgagcctgagagaggaaactctaatcagcagtttacgcaggatttatttgtgccatcttctgggaaacgaaaacgtgatgattcatctgcacactatcaaaatggtggatctatacctcaacaagatggtgcaagcgatgctatccc

SEQ ID NO: 637 - DNA, 408 bp, Arabidopsis thaliana
tttttttttttttttttatcagaacatagattttgattattactagtcaaaggctcaaagtcattagttgatttaacattacatttaaaccggaaacacacaaatccaaagacttatttgagaacacactaatgtacggtacttcatggtactgtacggaagattagataagaaagaagtgacacacgacgatggatcaaagcttgaattatgcatgagaatgggtagatcagcaatgtctggtgcagaagcaacgacgacggaatccacggcagttacctccgacaaagccttcgttgtggcacacgttggcgcagtttgatgcactcacgcatgtacccttgaacctatggctctgcgactcacaagtgcgtgcctccacagtgactggtcccatcccagtggcga

SEQ ID NO: 638 - DNA, 408 bp, Arabidopsis thaliana
cgagcggccgcccgggcaggtccggtgtccattgaagtgtataatcctaatgggaaatacagagttgttagcacaaaaccgatgcctggaactcgctggatcaatctcttggtagaccaaggttgtcgcgttgagatatgtcatttgaagaagacaatcttgtctgtagaagatatcattgatctgatcggagacaagtgtgatggagtcatcggtcagttgacggaagattggggagagactctgttctcagctttgagcaaagctggagggaaagctttcagtaacatggccgttggttataacaacgttgatgttgaagctgccaataagtatggaattgctgtcggtaacactccgggagtgttgactgagacgacggctgaactagctgcttctctttccttg

SEQ ID NO: 639 - DNA, 408 bp, Arabidopsis thaliana
  misc_feature (1)...(408): n = A,T,C or G
ttttccaggaatgagggtgacaatttcattgaaatgcttatagttttaattaaaatgtactttagacaacaatatttaataagttgaaaagaaaagaagaagcatttcggtttcgccaaattaggttcggcttggttcctgcatcgttagcattgcttgctgaaagnngacaatgtgtaatgcacatcacttgttgttatctggtggtgtataactattctgatccgggatgagtttccccggataaggagaatgccattctcctctagattcttccgcagtttctcagccgtaagtcttgaaccatcctccatatccatgaaaatcatgttggtctccacggctgcaacatttactctaatccctttcatttgattcaacccttcagctaacaacttagccttcttg

SEQ ID NO: 640 - DNA, 408 bp, Arabidopsis thaliana
acttacaagcctccatgaaacattgaaacccttagtttgcagagaacacagtcgtggttattgcggttttacattacaagctttgatttatctaatggagatacaatatattacaaaccattcttcacttgtcgatccctgccttcacagatctgcctttaattcaaattgaaatcaagaagaagatcgtttcccttcacaatcaagactctcatcgaaattcttcgaagggtatttagcagttatcccagcaacctcaaagacaagattatctccagaagatcgaatcccagtaatagaccacgacttgaaaaacgcccgaacccgaatcccttggagctccgcgatcttaccctgagagatccgacccgttactttgttagaataagtagcgatgtagttatcagg

SEQ ID NO: 641 - DNA, 408 bp, Arabidopsis thaliana
ctttttttttttttttttttttttagaaaaaaaggattaatcattaagagagaacaaagatgtttgttaaaggaatttcagaaataacatgacatacaagagcaataaacaacactaccaaaagccttttctcaaggccacaatgatggctcaaaaagtgaacatctttgaatccagccaaagcaaaacctgaatgcaatgattcagttactccggactcatcattcttcggctacatgatttgaacgggtacccgagtcactagcaccagcggcttttgtagccgcttgtttcttcctcctgctcttagctttcttagctttcattcgacgtttcttctcagctgaatcgatccatttgtaatctgaaggtatcaagaaagggtcagcctcgtctttgtaacggtta

SEQ ID NO: 642 - DNA, 408 bp, Arabidopsis thaliana
ttttttttttgatcataataatagatacttgatccattatattcaacatttggatcatccgaattcacatagaccagacacaaacactggtttaagggaaataagaagaagaagaaaaatatccataagacattattcaagaaaacgaaaattaaaaacttgagcttttagattccctattccttctcgtcctcgctgttgcagctactgttgctgctccactcacatttcaaggtagatctcggagaaccacaataccttcctagcttctcaaaactctgatacatcactgttcctctctcttctcctagagactccattgttgactctttgcatccgtaatcgtctaggtccacagagagaccagagtcgtagctcttctgtgccacggtcgagtggacagctaca

SEQ ID NO: 643 - DNA, 408 bp, Arabidopsis thaliana
ttttttatagaaaacacacagtatatatgttcttagacattaaattactacaaatttaatcataaagaaaaaacacaaaattgtaataaggccttaatttttaaagtcagaggaaaaagagaaaacaagtttcgatgttccaccgaagtgggcaaattcttaaaccgtaccaaactcccataaagactccaatacacttagaatgaaaaagcaagagacaaattggttggagcccaaacccatgtgggtcaaagtctctctaaggagttacttactgctgggcacattgcaccctttgagcaccacccggatggtcatcatcttcatcgtcatcatcataagcctctctttgagcttgtgccttcctcctcatctcatcctcaatgttgacatcgtggagcgtggtct

SEQ ID NO: 644 - DNA, 408 bp, Arabidopsis thaliana
cctctagagcggccgcccttttttttttttttttttttttttttttttgggtacccaaatatacaataatattaaaaccagtttaggaatttctttatgtacaactttttccataagtttaaaaagagagtttcttttgttttcctagtacttatacttattgctattcttttgtacaaaatcctaaaaaagaagaaaactttttaaaaccatgttaaaaagaagaagaagagcttcctttcgtctcttctaacaatccactcttctcttccactaccgcttctgctaactttttacaagaacctaacttaagagagatggaaggaaccttgaccttccgttatggcataaatcagcttctccttcatcttctctttggatgaataaggaggaagcttcagataattg

SEQ ID NO: 645 - DNA, 408 bp, Arabidopsis thaliana
gatgaagtttataaggatccatcacttcctcttatggtggatattggaagtggtagtggcagatttctcctatggcaagccaataagaatgttgaatcaagaaattacttggggctggaaatacgtcagaaactggtcaagcgcgccaacttttgggtgaatgagctcggactttcaaacgtacacttcatatttgcaaacgccatggtttcttttgaacatcttatatcgagctatcctggaccattggagattgtctcaatcttgtgtccggatcctcatttcaagaaacgtcatcaaaagagacgtgttgttcaaaagcctttggtgaattccattcttcaaaacctaaaacccggtggaaaaatatttgtgcaatccgatgtgctggatgtggctcaagacatg

SEQ ID NO: 646 - DNA, 408 bp, Arabidopsis thaliana
ctgacacaatcagagatccgagatattattcttggagctgagattactccaccctctcaacagaggcaacagatagctgagattgagaaacaggcaaaggaagccagccagcttactgcagtcacaacaagaactacaaatgttcatggtgatgagctcattgtcaccaccacaagcccttacgagcaatctgcattcggttccaagacagattggcgtgtacgtgcaatatcagccactaatctttaccttagagtcaatcacatatatgtgaactcagatgacataaaggaaaccggatacacctacatcatgccaaagaacattttgaagaagttcatatgcgttgcggatcttcgtactcaaattgctgggtatttatatggtattagtcccccggataatccc

SEQ ID NO: 647 - DNA, 408 bp, Arabidopsis thaliana
atatttcttttgattctcatcatctctgcattttctgaattggctcagacataatttcttcggtgacttccatggctccgcctgtctctgatgattccctacagcctcgagatgtttgtgttgtgggagtggcgcgaacgcctataggggacttccttggctccctctcgtctttgactgctacaagacttgggtccatagccatccaagccgcacttaagagagcacatgttgatccggcccttgtggaagaggtcttctttggcaatgtcttaactgccaatcttgggcaagcaccagcaagacaggctgcacttggtgctgggattccctattctgtgatctgcaccactatcaacaaagtttgtgctgcaggaatgaaatctgtaatgctagcgtctcaaagta

SEQ ID NO: 648 - DNA, 407 bp, Arabidopsis thaliana
  misc_feature (1)...(407): n = A,T,C or G
tgtttataaaggatacagtctcataaatattataagagtatatgatacaacaacaaatgaatatctcaaatgaatccnagggaaagtcacactcaaagaataacctgttgttttttggacagaactagaatataagcagacgacatgcatagagaagtcgtcactgcaaataaacagaaggttgtcacgaagactcgctagcggaaaaattttatggttctggctgttaagatttgactgagtcacacacagggaaatcttacgagggtggaagacattatcaacagaggagatgagatcaagggttgatcacagaagtagaagagaggcaagaaccattgcgaaaacagaaagtagaagagatagagtgattcgggtttgtccactaggtgcttgtgcattggttg

SEQ ID NO: 649 - DNA, 407 bp, Arabidopsis thaliana
tcgagcggccgcccgggcaggtaaaaaaagccgtttgggatttcttttacacgaacacattcttccgatctttcttgtttttaacttaccggtaataacgaagatatgcagaggtttttctccgccagatcgattctcggttacgccgtcaagacgcggaggaggtctttctcttctcgttcttcgtctctcctattcgacgacactcagttacagtttaaagaaagtgtatccaagtttgcgcaagatattatcgctcctcatgcagaaagaattgataaaactaattcatttccaaaggatgtaaacttatggaagctaatgggtgagtttaatctccatggaatcactgcgccagaggaatatggagggctaggtcttggttacttgtatcattgtattgcaat

SEQ ID NO: 650 - DNA, 407 bp, Arabidopsis thaliana
  misc_feature (1)...(407): n = A,T,C or G
cgtaaacatgtcatggccaacatcttatcgtgtactggttgtcaagctttcagtcgtgatcaactgttcgctgatggatccatgtctcacaatccacttcgaggccatacacgagttcagggccgtcttttctgtgctgtaaaagacttttgtcgaatcaataaattaaacaacatccgtttaaacctcatacgtcacacggtgtgacaacaacacattcgccctttaacacgaatctttcaccgaatccatagtcataagacgcctcgaatgagttttcatcaagtgaaacgtccgttcacaacatatccatgaaggtnnnaacagaggcacatggcacatgttatccaacgccgtcatctccagaagacgcctagaatacattagacgcactttattcgacgcag

SEQ ID NO: 651 - DNA, 407 bp, Arabidopsis thaliana
aagtttatgaacaacgtgcccaaatgattgaatcaggagagggagttgactgggcccttgcagaagctcttgcttttgctaccttagttgtggaaggcaatcatgtccgattgagtggtcaggatgtcgaacgaggaacatttagtcatcgtcattctgtccttcatgaccaggaaactggagaagagtattgtcctctagatcatctcatcatgaatcaggatcctgagatgtttactgttagcaacagttctctttcagaatttggtgtccttgggttcgaattgggttactccatggaaagcccgaactcgttggtactatgggaagctcagtttggagacttcgccaatggagctcaggtgatatttgatcagttcatcagcagtggagaagccaaatggctg

SEQ ID NO: 652 - DNA, 407 bp, Arabidopsis thaliana
  misc_feature (1)...(407): n = A,T,C or G
tcgccgccacgagtggcctcgacgtttggctcatggacgctgatcgagatgccctctctcgagccaccgcagctatctcctcctccgtcaaacgattcgtctccaaaggtctaatctccaaggaagttggtgatgatgctatgcatcgtctacgattaacatcgaatcttgaagatttgtgttctgctgatatcatcgatgaagccattgtggaatcagaagacattaagaagaagctgtttaaggatctagatggtatagctaagagttctgcgattttagcttctaacacaannnntatatccattactcgtcttgcatctgctacgagaagacccagccaggtcattggaatgcactttatgaaccctcctccaataatgaaactggttgaaatcattcgcggt

SEQ ID NO: 653 - DNA, 407 bp, Arabidopsis thaliana
ccacaccatcaagaaaacgtcgtcttgcaagtcgaagccacgaccacatggacgggcatctccggttatcatctacgcgcattctccaaaagtgatccacacgcgtgccgaagacttcatggccctggttcaaaggctgacgggtctagacgagattattagacggaacactagtgaatcttcctcttctgttgtgacggaagaggttaacgtcggggatgataacacggcggctccgtttagtcaggatagaacacaacgacagaagttaactgatatgccgttgttcacaccgagctcgatgaccttgtttggttctccaactcaacttatgtatatgtcaccgaaccggaccgattcatttcgacccttggtttttaagtccgaataagacttcttagcaaaaa

SEQ ID NO: 654 - DNA, 407 bp, Arabidopsis thaliana
cttttttttttttttttttttttttcacgtaatgcattcatattattattgcacaattataggaaacatcgctttaaaaggttcgtatacgacaactctcccaccaagatttaatatgtttaacaaaaattagaaaacattcatattgtgcccccagccaaaaaaaaaaaactactcatatactattagttataaaatgagatgaaatgtgttttttttctttctttttaatagttcacaagcaacacatgcatctatgagaagatcaatatacaaattacaacttttttttgtataatctcgtctctttcaatttaaattgtgaaatctttctttaacaagcagagccagcttctaccagcttgcttaatttgttgttccttaatctttcttcgtaaacttcactt

SEQ ID NO: 655 - DNA, 407 bp, Arabidopsis thaliana
aataatcatataaactcactgtttggagtcattttttgttccccaagcagtaaaattctgcagtcacagctattaaacgacatacaaacaaaaaaggtacaaaaaataagaactggactagtcaagctgcccaattatctcaatggatctaaaagctgcaatcaaagggtttctctgtcggttttcatgctccaatggctgtatccatgtctgcaacaccatcggctcctttgaatacaactcttaccttcgttgtgcacgactctttctcattgttcttgagggctctttgtccaaacacgtggatagtgtccttctggactcttcccatgaggtcataaagcggcttgcttagctttggtctgtgaaactcttctagaaccggaggtgcctgcatgtagagagtg

SEQ ID NO: 656 - DNA, 407 bp, Arabidopsis thaliana
ccacgcgtccggaagaatattccgatgcatataaccattcccttatgttgtgttctttaggagttccgttcagtgttatttaggtggtaaacaaaaaaatttcgtgcgatgtttcgacgatattttcttcaccggattctgggcttctcgacggcaaggttgatgtcgttaaatttctgatgatgacttatcggcatgtgttacagttgaattctaaagtcaacacgtgttttcggataagagtccaacgttaagaatctttttgctgtagatgttattctaatgggctattgttgggctccaattttcttgctgcacaatcgttgtaggctttaagtcttgtatcttttgtttaataaaattcacacgggaaaaaaaaaaaaaaaaaaaaaaaaaaaaaaaaaaaa

SEQ ID NO: 657 - DNA, 407 bp, Arabidopsis thaliana
ccacgcgtccggagaagacacaggcgaagcagaagcagaagcggaagcaggagcaggagatcacgcaggcacagttcaaggtcacggtctaggtccccatctaggtcgttatcacgctctccgaaacgctcacgcagacgctctccatcttattggaggtctcccaggcgaagaagcagcaggtcaaggcactgaagagaggaaactctaattgttgcggcagctttttttgttgcctctgttcatgtttttttttttttttctgtgtgttttcgtatccttacgattcagtggtaaaatatggttttgtgggtttacatgggataataacaacgttttcatatgatgttttagaaatttataagatgttataaaaaaataattattttaaaaaaaaaaaaaaaaaa

SEQ ID NO: 658 - DNA, 407 bp, Arabidopsis thaliana
ttttttttttttttttttttttttttagaagtaaaaaaacgattgtaaatcgtacttgtatccttaaaacattgaaaaagaagttggtaaaaaaagaagatatgaatatgtataatgtcttagaattaagttgagaaagaaatatcctagcaaaatccgagaaaattaagattgtacttttggcatccaaaaaaaagagcgaaatccaacaccagatagtatagaagaaattaaaaacaaccgatgcccccaaaggagtgtttcatatgacttgatagttctgggcaatcagctgcgtcctctgcacaaacctaggagtcgcaccaccacctcctctcagaggaatcattccagtcaccttcaagccactgtaggtacttgtcgctgcaaactgaacagagatgggg

SEQ ID NO: 659 - DNA, 407 bp, Arabidopsis thaliana
ctttttttgtttttttagtattttattgactagcgttcgttctttttttctatagtggagatagtcgcacgtaatgacagatcacagccatattattaaaagcttgtggtaaaaaggggtttcgttctaatgcccgaaaataatattctaaagctttggtatgttccccattacttgtatggataaggcctatattatagagtatataacttcgatcataggggtcaatttctagtcgcatagcttcataataattctgtaatgcttccgcataatttccttcagattgagccgacatccgttacggtcgtcattcgctttaacgaactctccgtttcagaaccgtatgtgagattttcatctcatacggctcctcctttaggtgcataatgaaaacggacgcgtgg

SEQ ID NO: 660 - DNA, 407 bp, Arabidopsis thaliana
  misc_feature (1)...(407): n = A,T,C or G
ttttttttttttttttgattgtctcacaaattctctcattaacgagggaggataaatagaattgaattcgaaatctgaccagagaacgacattaactcgaaacaaattcataagatcattacaaaaggaaaaatcaagagacacaaaccaaaccaaagaacccatttttttttttnnnntagcaaaccaatcacccaaaactgatatataataaaccggaccatgactctgcaaattaaagaaacacaacctcggctcaaagacactcttcactcttcttcttcatcataactaagccaagattcttcacttcttcactgctgcttacattccggtggcctctcacctgcttgaccttccgcaagttgacttcttccagccttcttgtgcccagctgatgacttctt

SEQ ID NO: 661 - DNA, 407 bp, Arabidopsis thaliana
cttgtgggttagttactcccaggaaacaaacaatgttagtgttaaaatctttttctcttcttttccacatttttcttttgtcaaaattgattgagtgtaccaaactttagttgagaagaacattttgtggttttaggagctgtgggattgacgtgacattagaatcatccgttgtttcccactttctgatcttacaatttctcctttctctatagtactgtctggagaaaaccatttcaacaatatcccaagatgtacaactgctggtatcattttgaaaaccagcggtgtcgtaaccaggcttagagcggttgtcccaaggagaagcagatagagtttcccttcgatgaggtgaagattggaggcacggctaagtagtacaaaggcaaactcccctatctgagcca

SEQ ID NO: 662 - DNA, 407 bp, Arabidopsis thaliana
tcgtgtaacaaagacttcgaagacgacgctgagcagaagtttcactacaaatccgaatggcaccgttacaatctcaagcgcaagatagctggtgttcctggagtaacagaggcactatttgaagctagacaagctgctatagctcaagagaaggttaaagctgttgaagcaccgatgctttatagttgtggaatctgtaacaaaggttacaggagttccaaggctcatgagcagcatcttaagtcgaagagtcatgttttgaaggcttcgacgagtactggagaggaggataaagcgatcatcaagcagcttccgcctcgtcgtgttgagaagaataacactgctcaattgaagggttcgattgaggaggaagagagtgaagatgaatggattgaggttgattcgga

SEQ ID NO: 663 - DNA, 407 bp, Arabidopsis thaliana
aagttctttgattctccagaaaattggacgaagctttggattcaaattccagaattaaaaaaaaacagaaaaaaaattctttaggttttcattttgaattcttaccagagagtttcaatggtggtagcaacgaccatagcgctttacgcgagtccagcgagcactgtatgttccacagctcaccaaatcaacgctcatatctcatgtgacctcgatctgaactctagatcttcatcggcgtcttcttccacgagttcgccgactatcggaggtctctctttgcttttctccggcgcttccgtcaaatcatcttcctcttcttcctcatcgcatccatccgtaggagaggaattagcttcaatacgccatgatcgtagcgaggatcggaccttaagcggatccttctg

SEQ ID NO: 664 - DNA, 407 bp, Arabidopsis thaliana
tttgttcgattttgtgatcatggcggtcattgagagcgtcggagctaatactactgtggaagctggtggtttgatctcgccgtcgccgccgtcttccgtcaccagtcaagaatcaggagcttcttctaacaacgatcacggtggaaatggaatccatgatgagatcggagtccacgtggcgagatccgacggtggtgagagttttaagcgtgatatgagagagcttcacgagctcttgtctaagcttaatcctatggctaaagagtttattcctccttcacttactaagccagttgttaatggttttaacggcggtttcttcgccgttaataatggctttgttgctgccggaaatttccccgtcaacgaagacggtagctttcgtcggaagaagtcgttcggacaac

SEQ ID NO: 665 - DNA, 406 bp, Arabidopsis thaliana
ttttttttcactacaaaaatggcacttactaaaagaaacaacaagagagacactagttcacagttagtaacctcctcactagctctaaagccataataaagctgacaaatcctccaactgatagaaaacattacatttagaaagaaaaagaaaacaagttctatagagaaaaggaaaaatgttacaacagacacgtaagacaacaaaagggagaaaagctactgagccactgtagaagcagtagctcctgattcatgtgaagacttatattccaacatctcaattctgtatctctccacatccttaactcctttgtcttgataaacctgtttctcagattcagtgagattgctccacatgtgtcctattttcttagtgatggatcgttcttgtccatggtactcag

SEQ ID NO: 666 - DNA, 406 bp, Arabidopsis thaliana
gaaaccataaagttgaaacatcaaagagacactactctcaacgttaccaaaactgtatgaaagccaaaataacattattgcctaaaccaacaaacaacatcaaatcttcaccggtgagatttaagattcaagaatcaacaacacaccaaactagagcttgaggaaaacgaactcctcaaccgctggaatttccccaatcttcttcagtgtctctttgcttggtatgtcatctactccaatcgccataatcgcttgcttcctcggtgcaattctcccaacgctcatgaagttaacattgacattagactctccaaggatgcttccgacagtcccgatcataccaggttgatccacctgcctgcacagtatgatactaccttcaagagttacatcgacctcaaaagat

SEQ ID NO: 667 - DNA, 406 bp, Arabidopsis thaliana
  misc_feature (1)...(406): n = A,T,C or G
ctttttttttttttttttttttttttaaaagagattaaattcaaaaactattgtattctgcaaagagcaacgtgacatgaaacaattaataagttaaaagttgcacagaattatatgaaaataaactagatgaaatgtagtagtactttgatctcaaactccaggaagtcccttttcgtttgcaatcaaacttcaggaaacacaacttctatcatactttcttccccaagaaaactcttcaaccgtttaacctcgtcatcactttctccatattccagaatctgcaactccttcacttggttcagaggcatggagacatcgagtgggtaacnattcagatcctcgatgatgagagtttcaagctttggagactgtttaagtatatctgcaagcaatttccaagctc

SEQ ID NO: 668 - DNA, 406 bp, Arabidopsis thaliana
tttttttttttttttttttttttttaataagtaacataatcaattaaaaagtatatcaaatacaacgaaatctgtatggaaacaaacaatacaaaatataacaggatacaattatacaagtataagtgtatagtctttacccaaaaaaaaacaagaactatgactatgagaccaaccatacgacatggtttttactaaggaaacaatgatgtagacagacataagtgcatctctgcaaatagacaaatggtataacggtaaaacggtactttaagattgtgggatgggcttcaaagtagctgggccttctcttcgcttaaggagttccgggaacttttgggaattccggcaacttgggaagttgaggcatcgtcggtagctctggctttggaatctctggaactgc

SEQ ID NO: 669 - DNA, 406 bp, Arabidopsis thaliana
  misc_feature (1)...(406): n = A,T,C or G
caacaaattacatatctctctctctgcgcgacttcgaagatcaacatccatggcgtcacaggtaaggtcagtaaaagttggcaatctctcttcaggagcaactgagcatgatattaaagagtttttctctttctctggtgaagttgaaagcatcgatatccaaagtaacgagcatagtgcttatgtcacatttaaagaaactcaaggagcagagactgctgtgctcttatctggagcgagtattgccgatcaatcagtcatcattgagttggctcccaactacagtccaccagcagcccctcatgctgaaacacagagcagcggtgcagaatctgttgtccagnnnncagaagatgttgtgagcagcatgttagcaaagggtttcattcttgggaaagatgctgtc

SEQ ID NO: 670 - DNA, 406 bp, Arabidopsis thaliana
ttcttcttggatgataccatgacttactcctctgcagtattcaagtcggatgatgaggatctgagaactgcacagatgagaaaaatctcgcttctgattgataaggcgagaatagagaaggaccacgaggttttagagataggatgtggatggggaactttggccatagaagttgtgagaagaactggatgcaaatacaccgggattacgctatctattgaacagcttaaatatgctgaagaaaaagtgaaagaagctggacttcaggactggattacttttgagctccgcgattatcgccaactatctgatgctcagaaatatgacagaatcatatcttgcgagatgctagaagcggtcggacatgagttcatggagatgtttttcagtcgatgtgaagccgcac

SEQ ID NO: 671 - DNA, 406 bp, Arabidopsis thaliana
  misc_feature (1)...(406): n = A,T,C or G
cagataaaaaatcatcacaactagttgatctcctcatcaagaacagtgataaaaagcttatagtattcttcatgacctgtgcttctgttgactactggggactcgtactttcaaaaattcctgccctgaagtccatatctttaattcctatccatggggatatgaagnnnnatgcaagagacaaggcattagcttcgtttactaaagcatcaagtggtgcccttctgtgcacagacgttgctgcacgtggacttgatattccaggcattgattatgttgttcagtatgatcccccacaagacccaaatatgttcaaccacagggccggcagaactgcaagattaggaagacaagggagggccattgtgtttttactgcccaaggaagaagcctatgtagagtttat

SEQ ID NO: 672 - DNA, 406 bp, Arabidopsis thaliana
aaaatggcatggcgcagtgcagcacgctctttcgtctccgctacagctagagctccgtctctccgatctccgccgccaacgcttccccgcctccgtccttcccaatcctctttgccccgccgccgatttgcctctttcactaatcccaggaatttgggagagctaggatgcacagagtcattcttgcctctgtacaatgttgtggctgcagcgagactcacatctcaccttaatgttaatctgcgagctttctgcgaactctctaacgggaatggaaaagatgggtgatggaagtggattttcagtcgctggcaagagaggtgctactgctttgtacttgagaatgcacaaagtggatacatcagttatcttgcagcagttggagacttgagaaaaggggtgtacc

SEQ ID NO: 673 - DNA, 406 bp, Arabidopsis thaliana
  misc_feature (1)...(406): n = A,T,C or G
ctcactgctgccttagagcctattaaggataatgacgaggctgttaaagcctatggaattcactttgcaacagaaatgtgcaaaaagattttggcccatggaatcacttcccttcatctctacacattgaacgtggacaaatcagctannnggatattaatgaaccttggtctgattgatgagtcaaaaatttctcgttctctaccttggagacgccctgcaaatgttttccgtactaaggaagatgttcgcccaattttctgggcaaaccgtccaaagagctacatatctagaacaaagggctggaatgacttcccacatggacgttggggtgattcacacagtgcagcatacagtacactttcggattatcagtttgcgcgcccaaaaggacgtgacaagaagc

SEQ ID NO: 674 - DNA, 406 bp, Arabidopsis thaliana
ttgactcagcttcaccctctgctcttttgatctgaatgattttctcagcctctgcttttcgctcgctgccactctcatcctcgccgcggcgttgatttcgttcatggcacgtttaacctgttgatcaggctcaatgtcgataattagggtttgaaggatttcgtaaccataagcagtcatggctttgtctagctcttcttccacagatttggcaatttcattcttctgctcgaacacatcgtccaagttcagctttggaacacatgctctgatcacatcaaagacgtaggccttgatttgggtggttggattgctgagtctgtaaaaagcatcacttgccttgtcagctaagactctgtattgtatggatgcaaccactgtcacaaacacattgtcctttgttttg

SEQ ID NO: 675 - DNA, 406 bp, Arabidopsis thaliana
tgggaagagtttgtttcttcgattcgtagatcaattctcagctgacattgaggtttatctcagatcgaaatcgagaagaagatgtttctcactaggactgagtatgacagaggagtcaatacattttctcctgaaggtcgtctctttcaggttgagtatgccattgaagctatcaagcttggttctactgctattggtgtaaagacgaaagagggagttgttcttgcagtcgagaagcgtattacttcgcctttactggagccgagtagtgttgagaagattatggaaattgatgaccatataggttgtgctatgagtggtctgattgctgacgcgcgaacacttgttgagcatgcacgagtagagacccagaaccacaggttctcgtatggtgagccaatgactg

SEQ ID NO: 676 - DNA, 406 bp, Arabidopsis thaliana
cactccacataataaacaccaaagatttcattctcttctccataatttcgaagtttcttgaattgggtttgtttcttgatttgtttcttgaattgggttttggtcttcttttcttactatatttggatatgatgatgggtcaagatgaggttgggagtgatcagacgcaaatcataaaagggaaacgtacgaagcgacaaagatcgtcttcgacgtttgtggtgacggcggcgacaacagtgacttcaacaagttcatcggccggtggaagtggaggagaaagagctgtttcagatgaatacaactcggcggtttcgtctccggtgactactgattgtacgcaagaagaagaagacatggcgatttgtctcatcatgttagctcgtgggacagttcttccatcgcc

SEQ ID NO: 677 - DNA, 406 bp, Arabidopsis thaliana
gcggccgcctaagtcgtttatgactgaagggaaggtttctcctgatccagttgcaattgatgcacctggagggtttctttttgagtggtggtctgtgttttgggacattttcattgcaaggacgaatgagaagcattcagaggctgctgcagcttatatagaggcacaacaaggtaaagcgaaggagcagcaaatgcaaatacagcaactgcagatgatgcgccaagctcaaatgcagcgtagggaccctaatcatccttctcttggcggtccaatgaatgctattggttctgaagggatgattgggcagtctaatgctagtgctttggctgctaaaatgtacgaggaacgcatgaagcagcctaatcctatgaattctgagacatcccaacctcatcttgatgca

SEQ ID NO: 678 - DNA, 406 bp, Arabidopsis thaliana
ttgaattaggcgatttcgattttattgattcaaaaggttcgaacaaagacgtaacaaagccaagaagaaaagaaaaaaactacaaaacagtaaaatgtcaaacacaagttatgcaaaatcacgacgacagttatgtttttgcttttagttataaagcgcctcaattagagacagcctcttctttcactgaaggacaatgcactattgtgaagctgccaccattcatcgaattctgctcttcaagctcctcttcttcttcttcttcgtgactactaaaaccgatggcatcaaatatcatagtgttaacttctctgaatctctcctctgataaagaaacttcagctagtaacctccatgccttctcttctgacgctccttcatagtcttctttcctccggacgcgtgg

SEQ ID NO: 679 - DNA, 406 bp, Arabidopsis thaliana
  misc_feature (1)...(406): n = A,T,C or G
ctttttttttttttttttttaagcaaaacactttttgatttatttcattgatgaagcataaaacaaattacaacaatataaagatatcatcaaacgaggaattttaaaaacaggaatgaaatgtgagatatagaaatctcaatttaaaatgtgtaatctctaggcacatttgaaaccagatggaaccttcttaccacaatggtttaggacaacgttcaaagaaatgggaacattaaggttgataccaagaacattagcctttagggcagtgcaaagacagaccgcggcttcaagatcaactagacctttgataagagcgcaacngttggacgttggtggcagagaaaccttaaccaaatccaacacgttagcacataccttaagtttaagagcgtctttacaagtg

SEQ ID NO: 680 - DNA, 406 bp, Arabidopsis thaliana
  misc_feature (1)...(406): n = A,T,C or G
tctagagcggccgccctttttttttttttttccaaaaggagaatgggtggctataaactttctgttggtgcgtcatcctgggatatcctaacttatagatgcatgaccatacatagaacaatctacttacactccacttaatcttcgtcctcacatttttgttgtctgaaatctcatcaggtaggttttggacaaacgatatgcacaccgctaagaccacactgtggaacttgtagtattactgagatttgcccttctgccttcaagnnnnnnccgagcacatcatccaaattgaagaaatctcccaaaagtgtcatgtttctcctatctctggattgcattgcgctattttgccaaccaatgcaccacattccttcatgagggaacagatagtcatgaggataaa

SEQ ID NO: 681 - DNA, 406 bp, Arabidopsis thaliana
  misc_feature (1)...(406): n = A,T,C or G
ttttttttttagaaaatatcagtgaccattacattacacctcaaaacaactgctgatttgaaatgttctaaaggaaagtgatattacgannnnnncaaaaccataatactgaaaacacaaagaaagttaaccccaaggagcgtaatagcttgttttctctcacaacagaatcgatattgatcaaatctaccttaaaagttacatctcatactcaaaataactcaaaagttaaccaaactgcgagattacagctaaaactcagattaagcagcagcaccaagaagctcctgatcgaaatgccatgttccatgtcctttgccaagtctcctaagttgagaaacatattctgagattttcttaatggcttccacctgttcgttcagaaacacactctcaataaaatctg

SEQ ID NO: 682 - DNA, 406 bp, Arabidopsis thaliana
gcggccgcttggtgtagacaaattcaaaccctaaccctagattgattgcgtacggagtttctctttggttaaaacccccacaaaaactgggagagcgatgaggaaagaggagattccagataaaagtcggactatcccgatcgatccgaatctgccgaaatgggtctgccaaaactgtcaccactcccttaccatcgtcggcgtcgattcctacgccggcaagttcttcaacgatccccctccgtccgctacgcagggctcatctatccatggagctaacagtgttcttggttcaacacgcatggacaactcttttgttgttttacctcgacataagcctcctcaatctcagggcattcctccacgtcctcgcggggcgtcctcacctcagcctgatgctactcaa

SEQ ID NO: 683 - DNA, 406 bp, Arabidopsis thaliana
  misc_feature (1)...(406): n = A,T,C or G
tttttttttttttttgattatataagctcttctctatactaatctttagcaaccaccagagtaggattaaattacaatttcattttcatatagtagaagaagcagaagcatgattataaacaagatttgacacacacacatatatatatatannnagatacgataattaaggcaaagttggagagagtgaaggattagtgaccttaagctctccacagccactaatgaaaaccgtcttcaaaggtctattccacaaagatctcgcgttttgagctctctcgtctccaagaaactccgcaaaatcgttaaactgtttaatattctccgacggcttatacgtcggaatcgaagaaatactcgtcactacatctaatccttcaagaacagttccgaatacaatgttacc

SEQ ID NO: 684 - DNA, 406 bp, Arabidopsis thaliana
tttttttttttttttttttttttgttaccttcaatgaggtaaattaaaattcaaaagcacgtaaatatctcaacaaattgtattagctacgtacggaaaataaacagatacaaataatcaaatcatatacagacgaataaatcaaaatcaaacccacaaaatcgatcgaatgagttcgtacatgtaaccagtttgaaatttgcttagatgttgattaacaccaacggtgatagtgtctataacctttagccaaacggtgtggatacaggtgcaggtccagcgagtgcatcagagcgtttgatgcttcccataccgcatatgatacaaccgggcgacgaaagagcagcaaacttagcaccacagagatcacaaacatcgtatccaatagtcgataatctgctgagcg

SEQ ID NO: 685 - DNA, 406 bp, Arabidopsis thaliana
gattgaagaagtccgtttaacggtaacaaacaccgacgatccaacactaccggtttggacattcaggatgtggttcttgggtctaatctcatgttctctcctctctttccttaaccaattcttctcgtaccgaaccgaaccgctcgtaatcactcaaatcacggttcaggtggctacactacctatcggtcatttcttggccaaggtgcttcccaaaacccggtttgggttacccggttgtggatcggcccggttctcgctgaacccgggtccgtttaacatgaaagagcatgttttgatatcgatatttgcgaatgcgggtagtgctttcggatccgggtcggcttatgcggttggtatcatcacaattattaaagctttttatggccggagtatctcttttatt

SEQ ID NO: 686 - DNA, 406 bp, Arabidopsis thaliana
  misc_feature (1)...(406): n = A,T,C or G
cacattataagactttaagaataaatgatggtacaaacaaaattcgttgcttttgttataatcttgttgccaggatgaaataagcacgacatcacaagtagagagacgccgcgaatacaatgtctcttttgatcttggaaacagcttcttctagtttagcttcaagctgtgtttctcctatagattttgcagctactatgagctnnngcagaacttcctccattctccttatcgctctgatcaagctcccttcgaaaacacgagcaatctccatgacctcatagaatttggacccttttgcccaagcatacaccgcctccattatatcaggtctgaaagactgcacaaaactctccacgtctatttcgaccttgcagtcaagctgaacttcagctacacgcctggc

SEQ ID NO: 687 - DNA, 406 bp, Arabidopsis thaliana
attacatcgtatgttcatcccactcttttggtctttatatacaatgaccttgatttattgaacataacacatctaaaagaatttgactctctttttcttttgtttttcaaaacaaagtgatatatattttcaagaatattataagagctctctacctctacatggagcaaccagactctcttcttcagtacgcttatttttccagtgaacatgacaaaacttcaaggccaagaacgtgagtcctttggctttaacactcaagaacttgagcattctctgttgatcttggccagctacaaccactggaccatcccaacacacccaagactaaatccaccttagcgcaaacactaaccaaactttcaatgtttgcttctatttgaaataacattactgctaatcctct

SEQ ID NO: 688 - DNA, 406 bp, Arabidopsis thaliana
  misc_feature (1)...(406): n = A,T,C or G
agggttggttctggtggtggtaacggtggtttacggaggttagatgctgatactgaaagctcgaggcgacggaggtcgttgtctagacagccggctagtaataatcgtggtggttcaagtaaggttgattcggtgagcaacaattcgagccggcggaggtcggtttctagacaaccgaatgagagggttaaggtcgagaacagtggtggtgtaattgagggagatcgtgagaacgcgaattcgcggcgacgacggtcgctttctgttgtccgtcgtcggattgagaattctgagagtgatgtagntcaagttcagtattcaagcagttcaagggatgtgaagagcttcatgagtggaaagagtcaaaatagtggttctcagaaatctgctgcttcagataatagac

SEQ ID NO: 689 - DNA, 405 bp, Arabidopsis thaliana
tttttttggtattgatttttttttttttcttaacctaaacgagaaattaactgatcaatgaagtttcacatcaaaattaaatctcactctaggaccgattttcctggttcaactctcaaatacatcggttcgttctgatcattgatttgagtggcaaagtctataaaccggggtaatgccttcccaaacgaaaccaaaccggaccgaaattctcattttttgtgagcttccaaatcagacattagcttagccggtttagcctttttctgtcggtacttggcatatgagtaccacacaccaccagctgtgttgaccactaaaccggacacgttcaaagcatgtacttcaacaccacccaagaggacaaaaccgagcgtagtggaaccaacgcctttgagaacacca

SEQ ID NO: 690 - DNA, 405 bp, Arabidopsis thaliana
ttttttttttttttccttcaaaacattgatgttattactgttgattggcataccaaaataggcatgtcatatccatagatcgtaataagcaatagcttcaagaataattgtgggagatccactacgaccgagaaactgccaaagttgattaaagtagttgtcaagttgtttaacaacatcaacaatatgaagaaataacctttgtgacattcagaaccgacgatggaactctctttcaccatacaaaagattatcagaaaaaataatcattgaacaaattatgatgagcagtttctttatcagggtgtattactgcgtgaccaagaatagagcctcgatgacttacgtgattgctatttcgagtgagttggtgaataagccgattgttgtaaactaataaattga

SEQ ID NO: 691 - DNA, 405 bp, Arabidopsis thaliana
ctttttttttttttttttttttttttttttttttttttttttttttttttttttgatcgactattaatttcaattttgataatctgaagaacatcaatatcatccatttttattttgataatatcatacttgactaggactgagcataatacgcgagtctacgaaaacaataacggtgaagcattataacaacaccaattattcattaaatctatgagaattcacgttggtttcggtttataaatctcgctaatatttgatgtaagcaacggaagaagtgttggcatctttgataagtgtaccaagaagaggagcaagcaaacatttcttgtccttctccttgtagaagtaacccaaacacttgcaatcacgatcgcacttagccttgcaatcgttcacagaagt

SEQ ID NO: 692 - DNA, 405 bp, Arabidopsis thaliana
tcgagcggccgcccgggcaggtcatacttttatgaatttggatgcaagatagagccactggtcacagatagaacactgggaatcttgctatcgactgcgtttaagatcagatacaaagaggcactgacaaaagtatacacagcagctcacataacagcttccaagtacttgtcgtttttaacaaaagaagaaacaaacttgtatgaagcagctcacttgtcgatgacagccttcaagaagtggagaacaggtggtcctagattccagagagcttcaatactcggaagaaaacgcaaggattctaattaagttccctataactctttcttatcataattatccaatagggtgattgtagcatataacaatctcaaaatgatgtaactgggtaacatacatttgatt

SEQ ID NO: 693 - DNA, 405 bp, Arabidopsis thaliana
cactccagcgaatgcgtacaaggttattgaggctggagcaaatgctctagtggctggatcagctgtatttggagctaaggactacgcagaagctataaaaggaattaaggccagcaaacgaccagcagctgtagctgtgtaatgtgaagcaacagcaagcgaaaagactctgttaaacttaggaacagttaaaaagtgaatgacgatcaccagaagtcccagatgttgtcgttgtgtctccattcgccataacattcacaagaatcaaactcaatatcttcaaagtaggctcctctatactattctgtaccattgtcttgtaaattgaggatatgcagattccatacattttgcaatgaaacactgtgataagaaatatgttgttacatatgtgtttttgactta

SEQ ID NO: 694 - DNA, 405 bp, Arabidopsis thaliana
aaattgtaccagagaatcccaatagctacagagcaagaaagagagaaaacttcagattgcaaagggagaagaagaaggcgagacgcgagaattactcgtacacacttcctacaccagaacttgttcttgcatctgcctcagtcgatgatgctgaagccaatccggagtgctataagattgaatgtggagtttccttgtctctttttgtttagtcttgtttatgaaaaatgatcctttcagagtattaagagttggttgtattgtcgaatccaagcctctcttttgtcaaattgagtcccaagcaggcggatttttacccaacttgagttattagtgtaatcaaatggttattgttaattagtcaaagcctcaaaggttttaatttaaaaaaaaaaaaaaaaaaaa

SEQ ID NO: 695 - DNA, 405 bp, Arabidopsis thaliana
  misc_feature (1)...(405): n = A,T,C or G
ggcaggtgcaaattatacggcggcgataaaaaatgcctcgagtcatccctccggagaatctcggttgcccaccattccgtgctttaacttttgactctctcgacttaataaaagtgactgaagctcgtggtcaagagagagggattccgactgtagtgaacacatggggagagatgaatgcatctagaagtgttcttgctgcttccattgatgaccggttaaggaatccgcttttggctgttgcaagaaaagatggcaatgttgaggttattaacccttgtaatggtgatcttcacttctcatactctgtatttggtgatgatggttgttcccctgannatnncgaaatttctgccctgcacttattcaggaaaaagatagatgatcagacagaaagatcttgca

SEQ ID NO: 696 - DNA, 405 bp, Arabidopsis thaliana
cattattgtctttggtttgtttgaactttcttgtgtgtgtggaccataagaagaaggaatggtgggaagcattgaggcaaagagtctgcaatcaaacgggtctgttcatcatattggtcttaatttggaggagaaacttgatgaatttcgtcgtcttttggggaaatcagaaaaagatccgttaaggattgtaagtgttggtgctggtgcttggggaagtgtttttgcagcacttcttcaagaaagctatggaggtttcagggataagtttcagatcaggatatggagaagagctgggagagctgttgatagagaaactgcagaacatttgtttgaagtgatcaattcaagggaagatatcttgaggagattgataagacgctgtgcttatctgaaatatgtcga

SEQ ID NO: 697 - DNA, 405 bp, Arabidopsis thaliana
ccacgcgtccgctccttcttcttctccttctcaaatcttttttttcaggcgtaacgaatcgaatcataaacacttacgcagaaacaaaaactaaactttggatcttttaaccgaccatagagattcgtgggttcttcttagtttcgacagattcttgatccgttttagttgttacgctcatctttgcttttatacatcagacccttctcttctcttccttctttatctaagaaacattagggttcattgaaatcttgctataaaaaaatgggtgttgagaaaatggtgtgtttggcttctcgcacgggtcgtcagtttcagagatacaacaaaggtcgtcgtcaagtcgttggatgtgttccttacagatttaagctatctaatgatggtaaaataagtgatgaa

SEQ ID NO: 698 - DNA, 405 bp, Arabidopsis thaliana
ttcaccggacttcgtcaatcatcaacggagcaaacaaacttcgtctctcatgtaccgtcatcactttctctccctcaacgacggacctctctccgagtaaccgcagccagagccactcccaaactctccaaccgtaaactccgtgtcgccgtcatcggtggtggaccagcaggcggggcagctgcagagactctagcacaaggaggaatcgagacgattctcatcgagcgtaagatggacaattgcaagccttgcggtggcgcgattcctctctgtatggtcggagaattcaacttgccgttggatattattgatcggagagtgacgaagatgaagatgatttcgccgtcgaacattgctgttgatattggtcgtacgcttaaggagcatgagtatataggtatg

SEQ ID NO: 699 - DNA, 405 bp, Arabidopsis thaliana
catggctggtttagctggtgactcagagacacatccttatgtctccttcactatcaaccttgcttaaaaatatgatgagagatgcttttgatgccacttctcctctggtcttctcatctgttatatttgtttgtggtctatagatttcacatttatttttcgtaacatattttgattttcataaataaggtggaactcaagagagatgttgctgtaattttatttggccggagtcttttagattccggcgagtttcagacacttgtggaagacagaagggttatacagttgttaaagcctttttgtcattttgtgacatggttgatttatttatatcatcactctgtttcgtttttgtctgaaaaaaaaaaaaaaaaaaaaaaaaaaaaaaaaaaaaaaaaaaag

SEQ ID NO: 700 - DNA, 405 bp, Arabidopsis thaliana
atctccctctctctacacaaagctctctatgccacaagtcgatctagaagcgtttgtttcttcagtatgcatcggtggctccgaccaccgcaagatcgtatgcgaaaccctcgccgacgactcaacgatcccaccttattacaacaactccgccgttagtccgagtgatttcccaccggaatcttatttcttgtcaaacgatgctcagctagagtggctcagcgacaacgccttctttgatcgtaaagactcacaaaaaggaaactctgggattctcaattctaatcccaactcgaatccaagctcgcaacggttcttactaaaatccaaagcgtcgatcatcggtttgcctaaaccgcagaaaacgtgtttcaacgaggcaaagcaacggagacacgcgggcaa

SEQ ID NO: 701 - DNA, 405 bp, Arabidopsis thaliana
ttggcaaaacctttgctctatgtaaagagttcaataaaattacaaatacttgaatgtagtatgttgatatacatgtgatagaagataatgcgattattgacacacaacgaacaaacaaacaaatcttagtaacgttctcagcccaattaacaaagctggaaaatctcttgtttcttcttgttcttggccaaaacagagagggagagagagggtgacaaagaatgaagttgtttcaatttgttcatctgaacaaggattgaagttcttcaagagttttgcctttggtctcaggaacccatagagtcacgaacaccactgtgaatgcacaaaccaatccatacagagtgaaagttcctccactgctccaggctaacagcaaatttgctgtcatggtgatcaaccaag

SEQ ID NO: 702 - DNA, 405 bp, Arabidopsis thaliana
attttcagcaaacgaaagggaagtgtgtcagaaatctcagagggtgagaatcccaatgaggatcttacccgaacctcgaggttcggttccgtgtcttctccttcttgtgtcggttctcttatcagcgactctctcactcgctcgtgtcgtcgaagttgtcggttacgccgagagcaagatcaaaaccccccatgcattttcaggacttcgagtgacgatcgactgtaaggtgaataaaggccattttgttacaaaaggttcgggaaacattgacgacaaaggaaagtttggtcttaatattcctcatgacattgtctccgacaacggagcgttaaaggaggagtgttacgctcagcttcacagcgcggcgggaacaccttgtccggctcacgacggccttgagtc

SEQ ID NO: 703 - DNA, 405 bp, Arabidopsis thaliana
tgtcactcccatctttcatattccttcacaatctctctctctgtctctcgatcttgtgaaccaccacacacactaacacaatgagagagatccttcacattcaaggtggtcaatgcggtaaccagattggttccaagttctgggaagtcatctgcgacgagcacggcatcgattccaccggacgttacagtggagacactgcagatctccagcttgaacgtatcaatgtctattacaatgaagcttcaggtggaagatacgttcctcgtgctgttcttatggatcttgagcctggtactatggatagtatcagatccggaccgtttggtcagatcttccgtcctgataactttgtctttggtcagtctggtgctggtaataattgggctaaaggtcattacactg

SEQ ID NO: 704 - DNA, 405 bp, Arabidopsis thaliana
  misc_feature (1)...(405): n = A,T,C or G
ttttttttttttttggttgatgacatatgctcaatcgtagtcattcaccttttgaattttgtcttttctcatataccgcacaagtagattccaatatctaaccaacatccagtcacaattttgagtacgacaaatcaacaaagccccacataaacaatgacagaaccaaagaaaaaagcatcttaatgtataacgacagtaatggtacaagtattattagctagtacagtgaacaacaaatcaacacaataatgttgaactagttcgttgcatcagnnncatnnnagtagcgtataatatactaaagtgtgttttgttaccgggcctaaggtgtatggtcttgtatggaaagtcctgttttcttgatggatatagtccagagaagatccgaatccgattcgactg

SEQ ID NO: 705 - DNA, 405 bp, Arabidopsis thaliana
ttttttttttttaacgccaatttcaatttatttgagtggaaaaatatcgtcaagccaagtacacaattacagaatggagaaactcttggtttctttattacatacagtagattgttttactcgccaaagacacgcttggcaccgtctacggtgttcctgagaagcattgccactgtcattgggcctacaccaccagggaccggagttatgaaacctgcaacttttgaagcttctgcgaaatcaacatctccaaccaaccggtatcctgatttcttgctcgggtcgctgactgcattagttccaacatcaattactgcagcccctggctttatccagttgcccttaatcatgtgggcttgtccgcatgcagcaataacaatgtcagcttcccgtatgatagcctca

SEQ ID NO: 706 - DNA, 405 bp, Arabidopsis thaliana
cctctagagcggccgcccttttttttttttttttaaattttaacacccatgttttgattcaaaagaagagagggagatctttgtttgttttctctgtataatcattcagtctggaaacaaaacatagcaaatcatgaactaagacatatagaggctttttgtacgctcagtttagcttaagtatcagatggtttctctgcggtttttccttctttgttgatgtgaaagccttcaatcttctttgaaacttcatccacgctatgcttcactctcctcgagctagtttcgttctcttcgggatttgctggtgttgtttgccagattctgattgtcccgtcttcagatcccgaggcataggataaaccagtgggagtaaacctaacgcagtgtactggaccgtgatgt

SEQ ID NO: 707 - DNA, 405 bp, Arabidopsis thaliana
tgaagagtgggtggaggaaccgaccttgcttgtcactagattcgagtacgcaaatctcttccatactgtgacagattggtatagtgcctatgtttcgtctagagtcaccggtttgcctaatcgacctcacgttgttttcgttgacggacactgcacgacgcagctagaagaaacatggacagctttgttttccggaatcagatacgcaaagaacttcaccaaaccggtttgtttccgccacgcgattctttcaccattgggatacgaaaccgctctttttaaaggcttgtccggagaaatagactgcaagggagattcagctcacaatctgtggcaaaacccggacgataaaaggactgcgaggatatcagagtttggtgaaatgatcagagcagctttcgggtt

SEQ ID NO: 708 - DNA, 405 bp, Arabidopsis thaliana
  misc_feature (1)...(405): n = A,T,C or G
cgtctcttccagctcttccgttattcgatcatgaatttagaaatcgtagtctctcagagattgataaacttgatctgtctatgaatcacttgatgtttggtattgctggatcttcacagctttgggaacgtcgtaaggaacttgtgagattatggtggaaaccttctcagatgcgtggacatgtctggcttgaagagcaagtttctcctgaggaaggtgatgattctcttcctcctataattgtctctgaagacagctctcgttttcgttacactaatcctactnntcatccttctggacttcgaatctctcgtattgctatggagtcttttcgtctctctctccctaatgttcggtggtttgttcttggtgatgatgatactatcttcaatgttcataatcttc

SEQ ID NO: 709 - DNA, 405 bp, Arabidopsis thaliana
  misc_feature (1)...(405): n = A,T,C or G
ccacgcgtccggaatttgtgtctctatggacttccaaatgagacatgggaggttaatctacccgttgaggaagttcctcctgagcttcctgaaccagctttaggcatcaatttcgctagagacggaatgcaagaaaaggactgggtatctttggtcgcagttcacagtgattcatggctgctttctgttgcattttactttggtgcacgtttcggatttggcaagaatgagaggaagaggctnnnccagatgattaatgagctgccaaccattttcgaagttgtgagcggcaatgcaaagcagtccaaggatctatctgttaacaacaataatagcaaaagcaaacctagtggcgtcaagtctcgccaatccgaatctctctcaaaggttgcaaagatgtcatct

SEQ ID NO: 710 - DNA, 405 bp, Arabidopsis thaliana
  misc_feature (1)...(405): n = A,T,C or G
ccacgcgtccgctcagccactgccagattcagtgttgatgcctctttagccggtgcaatcattgggaaaggcggagtcagttcaaagcanntatgtcgtcagacgggagtaaaattatcaattcaagatcacgagagagacccaaacttgaagaacattgtgcttgaaggaacacttgagcagataagcgaagcgagtgcaatggtaaaagatttgattgggaggcttaattcagcagctaagaaaccacctggtggtggtcttggtggtggtggtggcatgggttctgaagggaaaccacatccagggagcaacttcaagactaagatatgtgagagattctcaaaaggaaactgtacatttggtgatagatgtcactttgctcatggggaagcagagctacgc

SEQ ID NO: 711 - DNA, 405 bp, Arabidopsis thaliana
  misc_feature (1)...(405): n = A,T,C or G
ccacgcgtccgtggcgattgatacgatacaaaaaacaaaaaagcttcggtggggagaaattgacgaagaagaaggcgactatgatttccttcttccgcctaagcagatgattagtccggaccaaaacggtgtaaagaaggtgattgagtacaaattcaacgaagaggacaaaaaggtcaaaatcactaccacgacccgtgttcagaagcgagctctcaccaaacaagccgnggagcgacggagctggaataagttcggagacgcagctcatgaagaatccagtagttacctcacaatgcgttcaacagaggatatcatcttggaacgaattagagctcctggtagcaacgcggaacagtcgaccgtatcaggagatagcatgtctcagttgggcaaaccgggtgc

SEQ ID NO: 712 - DNA, 405 bp, Arabidopsis thaliana
caagcgagctagtgaagctaacgataagaacgataataccatcatcggttccgatttagcatcatctaagaaacgccgtatcgatttcactgaatcttcgtctgataagtcttcttcgattttagcttctggtagtagcaggggttttcacggcgatagcgtcgttcagcaaatcgacatggcttttggtaattcgaaccgtcaggagattgatgaagatctgcacagtcgccagctcgccgtctatggtcgtgagactatgaggcgtctctttgcttccaatgttctcatctcggggatgcacggtcttggtgccgagattgccaagaatcttatacttgctggtgtgaagtctgtgaccttgcatgatgaaagagttgtagagctatgggacttatcaagcaa

SEQ ID NO: 713 - DNA, 405 bp, Arabidopsis thaliana
catgttccgggaagagagagagagagaatcagaagtgtatcttgatctagggttcacagacaaaatctccatgctttgaactaagcagaattcatctggtcttttatctctttcatatcaaaccaaaggattgatctatccatatcgtccaaaacctatatctagctaagcctagaacttctctatcgtttaccactttctttctatatttcttctgaatttgtaacatcagaagtaataatgattccaagtatggagggaggcgggaagactaacagagaagaagaggaggaggaagaggaagaagaagaagaaggtgaagagagtaaggtttcaagcaatagtacagtggaagagagcgacaagaagactaaggttaggccttatgtgagatctaaagtccct

SEQ ID NO: 714 - DNA, 405 bp, Arabidopsis thaliana
cctttattaaagaccatcatgtcttccacttctttcaccgaccttcttggttcttccggcgttgactgttacgaagatgatgaagacttgagagtttctgggtcgagttttggtgggtactatccagagagaaccgggtctggtttacctaagttcaagacggctcaaccaccacctcttccgatttcacaatcttctcataacttcactttctccgattaccttgattctcctctgcttctcagctcctcacacagtttgatatctccaacaacaggaacgtttccattgcaaggctttaatggaacaacaaacaatcactcagattttccctggcagctacaatctcaaccatcaaacgcttcttctgctttgcaagaaacatatggtgttcaagatcacgag

SEQ ID NO: 715 - DNA, 405 bp, Arabidopsis thaliana
gctataatttacaagcaacagggaaattactcggatgctatatcctgctataatgaggttcttcgtattgacccattggcagctgacgctctggttaatagagggaatacttacaaagagatcgggagggtaactgaagcaattcaggattacatgcatgctataaacttccggcctacaatggctgaagctcacgcaaacctggcctcagcttacaaggatagtgggcatgtagaagctgccattacgagctataagcaggccttgcttctacgaccagacttcccagaagcaacgtgtaaccttctacacaccttacagtgtgtatgctgttgggaggaccgtagcaaaatgttcgctgaagttgaaagcattattaggaggcaaataaatatgtcggtcctt

SEQ ID NO: 716 - DNA, 405 bp, Arabidopsis thaliana
cactgggaacatacttcttatcccaaatttccttgattttcttggatatgttgaatgtatacagaatgtacagtgagcttgtgtcaaccaacattactgagggaggaccatatgcttccaagacatcttttgtaaaactcttaagatcggttaagagggaaacacttaagctgatagaaacctttttagacaaagctgaagaccagccacacatagggaaacaatttgtgccgccaatgatggaatcagtacttggtgactatgcgaggaatgtgcctgatgctagggaatccgaagttctttcactctttgcaacgattataaacaagtacaaggcaacaatgttagacgacgtgcctcacatatttgaagctgtattccagtgtacattggagatgataacta

SEQ ID NO: 717 - DNA, 405 bp, Arabidopsis thaliana
tggcaaaagctatggagctttgggtgggagagatgaaaaagatgagtgagaagataaacactagaaatccattgatgcaaaggaagaattcaacatctgttgtgtccaaacaacaacaaggatcagaagaagaaagaggacttattaaccaaaagattagagagaaaaatgaagctgtaactatgtctgagctcactgtttgtcttctcatggaccgttttgttccttggtgatctttccatacccaactacttctagatctcttctttggtgatgtgtatatatatatctagaaactacatgtagtatgtctatatatcagattttgtttgtgcagaccatgtttttaagtttccttgtaaacctgtgaaagtaatgtgtttggaaacatatttttattacttt

SEQ ID NO: 718 - DNA, 404 bp, Arabidopsis thaliana
tatcaagtttgcaacaacatttattcaccaccacacataagagcacatttaaggtgaaaagactcgggcgaacaaaggatttattaaaacaccaaacatattttagcaaaataggtaagagagaaaagcaaatcaagcagcagcaacaactgtcttgtgcttctcgagattggcaatgatttcttctttcgcagcaccaaccacagtctccttgatctctccttctttcatgaagataaacgttggcattgcctgaactttaaactcctcagcaacagtgttcaattcgtcaacatcgaccttgaagaagactacgtcgaggtgcttcttggctaagtcagcaaagacgggtgcaatgaaacggcaaggtgggcaccatgttgcagtgaagtctatcacaatca

SEQ ID NO: 719 - DNA, 404 bp, Arabidopsis thaliana
gagcggccgcccgggcaggtactcgtatagatcaaacgagatcgtcttcaagataatcatacacggagatactaagtttgtcctcctcctccatattcgccatggaagatctctcttcacaatcaccactcccagacacagcaccatggaatccggcgtccacggccatgccggcgtcggaagcagctttttggatggacttaggagatatattggaggcgagggaggttgtaagtaagtgagggaagttaaaagattcgtcgtcgagggaagatggtcggtgcaagcagtaaaaagcgacgtcgtgggctacggcagcgccttctgcggtggagaaagagcctaaccagagacgttgacgagttcccgggacacgaatctctgatacccattttccccatttc

SEQ ID NO: 720 - DNA, 404 bp, Arabidopsis thaliana
  misc_feature (1)...(404): n = A,T,C or G
ccattgctcttaccacagagagtagctctaatgtgaagagatcattcgttgtcatgtctccggtgngatttgatccattagccggaggagaagagtcttgttttgtcggcttgagtatgacgaatctacagacaggacattgtcctttggtctttaaccatggaactatacattcctcgtgaaacatgtgtttgcaaggagtgagcatcactgtttccttgggctcgaagtcttctaaacacacggagcatcttttgtcgtcttcttcacctgagagattttgagtgtttcttgannnnncgcttcccgggtttttgtttctgtagtataagctcaggcttctgagaagggtgctttttggaactgggttatatgtttcttttgttagatgtttgaggatctcg

SEQ ID NO: 721 - DNA, 404 bp, Arabidopsis thaliana
  misc_feature (1)...(404): n = A,T,C or G
gagggttctggaattactttagcctcggaatggatgctcagatttcttatgcgtttcattctgagaggaagcttcaccctgaaaagtttaagaatcagctggttaatcagagtacgtatgtaaagcttggttgcacgcaaggatggttttgtgcctctcttttccaccctgcttcacggaatatagctcagcttgccaaggttaagattgcaactagaaatggccagtggcaggacctccacataccacatagcatcaggtccattgtatgtctgaatctgcccagcttttcgggaggattaaatccttggggcacaccaaatcccaggnnacaacgtgatagaggcttgactccaccatttgtagatgatggcctcattgaggttgttgggtttagaaatgct

SEQ ID NO: 722 - DNA, 404 bp, Arabidopsis thaliana
  misc_feature (1)...(404): n = A,T,C or G
caaaaagatgaagcctaaggtcgccaaaaccacttgcaaagtttcatctgcgatcccagcaagaccaccatcttntcctcctgacccttcaggacgctcctcaccatttccaccaccgccaccactgcctcctccacgtggaggcatgttgccgccactgtcagtatcataaaagtctttcttctgtatctgctctcgcaacatatcttcaaccgatttcttccccatagctttctctattgctttccatggcgatatctcatcactaccatcaggtttatctttcccaccaaataagcacacagcagaactttgtttcgatttcccagtaggtaaacgacggcgatgatcaagaagaggcgaaaactgagtagacactgcagacctgcccgggcggccgctcg

SEQ ID NO: 723 - DNA, 404 bp, Arabidopsis thaliana
cttttttttttttttttttttttttttttttttttttttttttttattattgttaacttctttttattaagaactctcctttattaattgggacaaagcaaacttgcacatgaaaaaaatcagaaggaaacaagacgtaattaaaattttacaaacatagatatatgactattgattgcatgcatgaaccattgattgatcaacacacacaagtttcaaatttattacaataaaacgcaaacaatactttgaaaatgatgagaaagctttctctgcttggattctctctttcatcttttgtttctcttattacaatcaccagtactggtttcgtcttgtctttgtcttcttgtgtacatcgtgttctccgtgatagagatatctaatagtggtcggacgcgtgg

SEQ ID NO: 724 - DNA, 404 bp, Arabidopsis thaliana
ctttttttttttttttttttttttaggtttaactttttattaatggggataattttgggttcgaacaagagagcaaaaaagataaaactgtaaaactgctaaagaaaaaagaagattctgttggatatggtgaagaagagaaacgctcctactcaaattccgaaacaaaactcatgagatttctacagctcgtcctttgcggccgtttcctcggtcttcttaggttcctcactcttggtagactcttctccatgagaagttggcttcttctcactgttcttctcaacgaagtttatgaagtcttcctttgtcctgtctccttcgtacactacaacatttccgctcgctgacctgaagtaaatggtcgggaatcctttcacatcgaaggtatcacttgggatatc

SEQ ID NO: 725 - DNA, 404 bp, Arabidopsis thaliana
  misc_feature (1)...(404): n = A,T,C or G
tcgtatcctcgttgtaaagctcgtagatgtatgtagtaactgcagttcccgggtgttttggcgttccagtcttgttgatcacatgctggatcaaattgctattgtaagtgtttgcattctctaccgttgcgtcgtgctcagaagggcctcctttagatggccatccagattctgtgaccacgattggaatgttggtgaagttaagataagacattgcaaaataagcagcgtctangattgcatcaaaaacgtttgtgtaatgtaacaatgtgttggcgtctacagcttctttgnnggcttnnagaggctggaaaagcgcgtagtcaagcggtataactccattggactgaacatagtcgaaatacgggtaaacgttgagcagcaatggcgatcctgtggactgt

SEQ ID NO: 726 - DNA, 404 bp, Arabidopsis thaliana
gtacaatgactccttcttaatctcagatctgaggcaggaccgatcaaaaggaggattcgcatatggtccattgagtattccatcagctatccatttgtatgcagcctcagtcatatgtggagtctggaaccttctcaactttcataaggttaaccaagggatctactttacttggcagaaccaggtggagaacatagctatcattacggagagcaactctcgttgatggagtgagtttcgttatgtctatacttttgtcaatatcgacaacatacttcccctctggatgaaccttaaccaagaccttgttttttcccatcacttttaccacttcacccacataggacccaggttcttgaaggagctgtaactcttctctgagcattcgtacctcggccgcgacc

SEQ ID NO: 727 - DNA, 404 bp, Arabidopsis thaliana
  misc_feature (1)...(404): n = A,T,C or G
tcgagcggccgcccgggcaggtaccagtagctgcacggtgaggccgtgaaaacgcaagccctcgatcatacatccgctgaaattcctctctgtattcagtcagagacttgtcaggtatggctggagtcagctccaccacatctcccatcttcagcttgcatttcagatcacttacaggtgtctggttaagtcttggccttagctcttcctttgccgggatgctgtacattgaccatctcgagctccctggtcctgctctgcgtaacaggtccgacacggtagaattctcgggaaactcttgcacagtcatcttctcattttcgnnnacaatcacatagactggtnnttcttggttaccactaggcttatatgaaaacggacagtcttctgcgtgagacgggaaa

SEQ ID NO: 728 - DNA, 404 bp, Arabidopsis thaliana
  misc_feature (1)...(404): n = A,T,C or G
atgccagtacgcataagtgagagatttcatgagaacatatccatgcgccaaagtactatgatcaataatgctattaggaacgtaaagaaagacctccttggccagcctcttcagttgctctcaggtgttgatattcttggcaatgcaagcagcgcgcttggacatatgagtcaaggcatagctgcattatcaatggatannnaattcatccaaagtcgacagagacaggaaaacaaaggtgttgaggactttggcgatattatcagagaaggaggtggagctctagcgnnnggcctgtttagaggagtcacaggcatattgacaaagcctctcgaaggtgcaaagtcttctggtgtcgaaggctttgtctctgggtttgggaaaggaatcattggtgctgctgc

SEQ ID NO: 729 - DNA, 404 bp, Arabidopsis thaliana
agagcggccgccctttttttttttttttttaatttgtgagaactacattttatctgaaacaacttcaactgttgattataaactactgaccattacattttgcctcgtaaaaagggtaaaacagaaaacgttacattttcttattttttgaagctgggaaataccattgtaatcaggcacctttttgtgtgtatatacctctttaacaccgtcaaaatactcttcttgggttgggtccatagaaatttacttgtgttcggaagctgcaaggagcctcggctttgttaaccaatactgctcgaacctttgtcttgcatactccatgtagtcaaagtcgatttcattcacatgttccgatataattccccataaaccccaaattagatgactagcaagtgtatatt

SEQ ID NO: 730 - DNA, 404 bp, Arabidopsis thaliana
  misc_feature (1)...(404): n = A,T,C or G
gcggccgctggacttcttgcacatgcaaagactagacatggaaacaggagcaaaaacccctcttgcatggattgacaatgcaggaaagtgctttttccctgnnntttatgagagtgatgaaaggaccaattactgccatcataaatgtgtggaagacccaaaacagaatgctcctcatgatatcaaacttcgcctagagattgatgttaatggtggcgagacaccgaggttaaatttggaggagtgcagtgatgagtctggtgataatatgatggacgatgttccccttgctcaacgatcttcaaatgagcactatgacgaggctacggaggatagctgcagccgcaagctcgaagctgctgtttcgaaatgggatgagactgatgctatagtcgtctctggtg

SEQ ID NO: 731 - DNA, 404 bp, Arabidopsis thaliana
gcggccgcttagaaatcacacaacatacaaagacatttttgtttttttcaaatacaagtgaacaaagtttaacaatggcagatgatgaacaaagctcactaacttcaacaatggccataatgaacaaacaacaaagaggtaaagaaaaaacctccaaaactacttgacgattaatcacacagtcgttaaacaaaactcgaaccatccacaggtatgaatccggtttggtcttctttcatcgccttctaggtggtgagcattgaggttgttgattccatgaataagaacattttcgcagtcacgatcgcactaacatattaaacaccggggaaaacaacctctacgcgtctctcatgctaatgtttagactatttctcatcgtccttcttccaacaccagcattt

SEQ ID NO: 732 - DNA, 404 bp, Arabidopsis thaliana
  misc_feature (1)...(404): n = A,T,C or G
attgattcaagattatttatgcggtatggagtactgaccgactctgcgtgaagatgggacactggtgatgcacacctagcagagcagaggaagactataggcatgagattagttgctgcctctgnangcaatcacttggcttgtgcccccgcatcaatgaagaggttggtagcattgagcagtcgattggcagtcacatctaagatgaagctagcaatctcctctggctgaccggcagtctcagccaatgtcacctgcttggcaaatgcatcagcagcgtcaaacagaccaggatcgatattacgtagaccatcagtttgaactggccctgggttgactgtcagcactcgtacattctgctgtgccgcttcgggagctacactacgagtatagttgtctacgaa

SEQ ID NO: 733 - DNA, 404 bp, Arabidopsis thaliana
  misc_feature (1)...(404): n = A,T,C or G
gcccttttttttttttttttttttttttttttttttttttagtatctttgatggtttatnnaggaggaaaaacaacaaagaaacataagaaatgtccagaaataaagatagctaattgttaaatacaatcctctaggagcatattcatttgatcaaatacttacggctacataaaacttggacaaaacttattttgtttcagtagtagatggtaacaaagggcttccttaaaaagctcaacatttgacttccaatcactcacatagaccacacttccctaagaagctcatatcttgaaattgtcacccctggccctattttctcagcttcctgcttcacattcctgccctgtgcggaaattggtgacagcgatacgttttcaatgatggatgtaagaggagaat

SEQ ID NO: 734 - DNA, 404 bp, Arabidopsis thaliana
tttttttgaaaaatcgcctaaaattatgatcaaaatagactaaaagaaatacaatgatatggccactggccagttctctttctcacctcctaaaggagccaagtacaaattgaattaagggtagtaaaaaaagaaagttaacaacaaaaaaaatgaattcaagcaatcctacaaaatggccaagttctagtgaaaactaaatttggtaaaaattaacaagtcacactgaggatgtatcgatgagaacatcgtttagcacatcatcttcgccattcgccatagcgagcagctccgcatctctctcttcctcgttggagaagtctctcctttcgaatttcgagttagcggatataaagatcagcttttgagctcgatccacggctgcgcgtgatcttccattcgaa

SEQ ID NO: 735 - DNA, 404 bp, Arabidopsis thaliana
gccctttttttttttttttaatcaaaaaatcttgaagatgtatcataataatcttattctaaaacttatcattattcttgcaaacgcgtataagagcagcaaattcattcaaaggaggaacatagactccttagaatacctgaacacaataggtttactgatgaatatgaaacaattattctgaaagtctagagaacaagcttattccttcttcaaggtgtcttcaacttggggcgcgatggaagcaactgataacaagagataagtgaggtggtaaacccgaaagcaccagtgacacgaggactaatcgtctttggagctaactgaaggagaccaatggctacaataatgtccatgcttgatttaatcaaagctagagttctgtcgtttgatttctgaagctt

SEQ ID NO: 736 - DNA, 404 bp, Arabidopsis thaliana
  misc_feature (1)...(404): n = A,T,C or G
cactttcggggtttaaaagacggacttgtgggacagattcaagcaacaagtcaagctttgggagagagagaagaggataatcgtgcagtttctattgcagcacgtggagaaactccacggttgagattgctcgatcaagctttgcggcaacagaaatcgtatcgccaaatgactcttgttgacgctcatccttggcgnccacaacgcggcttgcctgaacgcgcagtcacaacgttgagagctnggctctttgaacactttcttcacccatatccgagcgatgttgataagcatatattgncccgacaaactggtttatcaagaagtcaggtatcaaattggttcattaatgcaagagttaggctatggaaaccaatgattgaagaaatgtactgtgaagaaac

SEQ ID NO: 737 - DNA, 404 bp, Arabidopsis thaliana
ggagttcattaatgaagtcaacacattggcgtcgctgcaacaccagaacctttgtaagctggtaggctatcatgctcgtgtcggttctgacacaagaatgttggtgtacgagaggcttgctctgggcagcttggaccgtttactgcatgggagatcagatgggcctcctcttgattggaacactagaatgaagattgcactatgcgcagctcagggtctaaccttcttgcacgaagaaggcccttttcaggcaatgtacaatgaattttcgacggcaaatatccaagtcgataaagatttcagcgccaagctatcaggatacggttgtgcaggccatgcgcctgagacagagacatctaatagttcggcacttgctaatctctctgtcgagactctagagagag

SEQ ID NO: 738 - DNA, 404 bp, Arabidopsis thaliana
gccgctactcaacggtggtgaattttctacacggtcagttcgatcctctttttatcgacaatcctacacaaatccataatcatggccgccactgcttcctccgaagcttctgaaggaccagtgatgggtctcatcaacaagcgtctccgtgctctccgtaagaaatacaatcgaatcactcaaatggaagaatcgatttctcaaggcaaaaccctaaacaaggagcaagaagaagtcctccgctctaaacctgccgtcgtcatcctaatcgacgagcttgaaaagatccgtgctcctctctccgccgctgtgacagaggaaatcagcctcgctactcagcttaaccgtgcttcatccgatcaaaccaccgcatctgagcaaaaggaagtcactgatatcccgca

SEQ ID NO: 739 - DNA, 404 bp, Arabidopsis thaliana
cctacgcgagaccttcgaatcttcccaaagtggcgaccttgaattaacacctgcataaagtttccatttttcattcttcgtttcgtgatcatggaggaagaagatagcgtgattcctaagaatacagaaggagatgggcgtgttggaagtgatcttgaaggaatccgtaagccaaagaagatgaagaagatgagaagcaggaagagtgatgataaagagacgaagaagaagaagaaaaagtattggatgggttgtctcagagctgaatcagacgaaagtggaaacgtcgatttgactgttgatttccctggcgaacgcactgagccgactcacctagtcgtcatggtcaacggtctcatcggcagtgctcagaattggagattcgccgctaagcagatgcttaa

SEQ ID NO: 740 - DNA, 403 bp, Arabidopsis thaliana
ctttttttttttttttatggagaagcgaagttactcttctcgaattatgataaaaagttacatcaacacaggattatctgtttttttcacttgataaatttgcattttaaaacacacttcatggataaaacggatcatttcttgccactcttcttaagtccagaacctccaaaggatcccttctgcgatgccttggctctaagctctttaagggccttttcctcatctttcttcttctgaatgttagctaagtcagtctcgtcgtattccttcttatcagctttaggctgcttcaaaggtttcgcctttcctccttgcttggaagacatgattggttcgttgagctagggttcgatgttgagctcaaaattggggaaaaagtagctgagagtcggacgcgtgg

SEQ ID NO: 741 - DNA, 403 bp, Arabidopsis thaliana
tttttttgactgaatctatgtgtttacattatattcttttcaggaacagtatagttttacagaactccccttagaacaaatttcatcaacgacaacaactctaagagaaactcggaaaaaaacagaaaactttgagagtaaaggcacataataagacaaagaagaggtaaaataaagtctagcaagccttacagcttcgcctgcaatagccaggaagctctgtagttccaaccatgtactctggattctttgtgcattccccaagaactgcccatctctcacagctctcgttcatatccgtgcagtttccgcttggtgtcacgatcctatcaaatgagtctacgtggatccacttggttgccgaccatttctctccttctatcacaggacatccaccgtgaag

SEQ ID NO: 742 - DNA, 403 bp, Arabidopsis thaliana
tcgagcggccgcccgggcaggtacaaacaccaccttgttcatggaattacgggcttcaacagggaagagcttgcaacgatcagaggccatgaaagctcccacaagactcatgaaaagaacttgaataaccggcatagaagccacctccaacaacgaccagaatcccatctttttatgtggttctttagactaatgatcaagggattatatattatggctcaagctctaatctcttcttcttcttctttcttctttcttctgcagttatctgcagagaattaataagcagaagaagcagaatgattaaacaataatttgtggaattgagacatgccagagttttgagtattttgagacccgtatcattggagtagtagcacgaacttgtacctcggccgcgacc

SEQ ID NO: 743 - DNA, 403 bp, Arabidopsis thaliana
ggccgcccgggcaggtcggaattcttcacaacccttcaagggaagagagagttattcactgctatgagttcgtcgtttcattgagattatacacaaaacaagattataacttttctgctgggttttggagactatggctggtggtaacgaagtcaaccttaacgaatgcaagagaattgtcccactcaacacatgggtcctcatttccaatttcaagcttgcttacaaagtcctccgtcgccctgacggttctttcaaccgcgacctcgctgagttccttgaccgtaaagttcccgccaacgctttccccctcgacggcgttttctccttcgaccacgtcgactcaacaactaaccttctcaccagaatctaccaacctgcgtctctccttcatcagacccgt

SEQ ID NO: 744 - DNA, 403 bp, Arabidopsis thaliana
tcgagcggccgcccgggcaggtcgccattaacaagatctctcttcttctactcgatttatgataagctacggattcactcgtcggatgatttgaaagtttctgaatcaaacagagtattctcaatgcagagaaccatctcacttgcggctgctaagtcttcttcttcgacttcagttctgtctcttcatcctctcatggctaagttgcagtgcagggcgattcaaaatttcccagcttcctcttcctcttcagtagttcgggtcgatagagtgtatagaaatgtatcccagcttcagtttaaaagagaaaattcaagttgtcttaagttagcttgtgcacttccttcgcatctaagtcttctcggttctcttagttatgcaacacattggagcagctccactt

SEQ ID NO: 745 - DNA, 403 bp, Arabidopsis thaliana
  misc_feature (1)...(403): n = A,T,C or G
ggatgaaaagagaaggtgaagatgaagggatgtctatagaagtaagcaaaggagttaaagagccaagagttgtggttcagacaataagtgatattgatgttcttatagatggctttagatggaggaaatatggtcaaaaagttgtcaaaggaaatactaatccaaggagctactacaagtgcacattccaaggttgtggagtgaagaagcaagtggaaagatccgcagcannngagagagcagttctcactacctatgaaggaagacacaatcacgatatcccaaccgcgctacgtcgctcgtgaaattattgggacttagtcactagtaatatgatttaggctttctaaaaacaaaaaatcttactatggcttatcttttgtgctcattcacagtttgttta

SEQ ID NO: 746 - DNA, 403 bp, Arabidopsis thaliana
catgacaaagtcatatatgcaacatgaaatataagataaagaaaacaaactcttagatcattttgcagacaacgttatacgacgaataatcaaacaaacgaaaaatgattctccaagaacatgttaaatttcatgttcatcagaagatcataattagtagtaagtaggttcagacgtgtagaagaaaggaccagcccagtaaagcttgaagctcttgtcttgaagaatacggtacgtgctcaatggctgtcctctaacacctttgttcacatcggtcggaaaatcgcaatcagcgagtggagatttgtaaaggtaagttttgcatttggtcactgtccttcctgcacgaagctgcgaagggaatatcgtggcgatgaagtaacctttagcatcagttttgctg

SEQ ID NO: 747 - DNA, 403 bp, Arabidopsis thaliana
cgcttcttccttcaactgagtccgactaagttgactcgttctctcgtgttttcgatagacacaaactatgacggagatcgatcgttcacgcgcgttcgccaaagacgttaagcgtatcgtcgtcaaggttgggactgcagttgttactgggaaaggtggaagattggctcttggacgtttaggagctatctgtgaacagcttgcggagttaaactcagatggatttgaggtcattttggtgtcatctggtgccgttggtcttggtcgacaaaggcttcgatacagacaattagtcaacagcagttttgcagatttacagaagccacaaatggaacttgatgggaaggcttgtgctggtgttgggcagagcagtctcatggcttactatgagactatgtttgac

SEQ ID NO: 748 - DNA, 403 bp, Arabidopsis thaliana
aggtacatatcacttttacaattgtagcagaaagttacactacctattataattgaaaaaatgaaatgacatctttaatatctgcttttaaattgaggaatcaaaacagaggaggaatactctgttcgttcctgaagaaatttgttggatcaatcttccctttaaccaaacccaatctcttgaaattacctttgaaatacatctcaccccatttccttgcatcttcgaaactcgtgttaatccctttggtcgagcccaaatcaagatctctgtaattcaaataagctcctctcggcgatttagaaacatacggagtcatgtaatcgtgtaacgatctcatccacctgacatgtttgttcatctcctcgacttcattcactttccatttcaccatgtacctcgg

SEQ ID NO: 749 - DNA, 403 bp, Arabidopsis thaliana
ttcttcccacaattgtgatgttcctcatgtcaaccgtactgattatcagctgattgacatttctgaagatggatatgtcagtttgttgactgataacggtagtaccaaggatgaccttaagctccctaatgatgacactctgctccaacagatcaagagtgggtttgatgatggaaaagatctagtggtgagtgtgatgtcagctatgggagaggaacagatcaatgctcttaaggacatcggtcccaagtgagactaacaaagcctcccctttgttatgagattcttcttcttcttctgtaggcttccattactcatcggagattatcttgtttttgggtgactcctattttggatatttaaacttttgttaataatgccatcttctttaaccaaaaaaaaa

SEQ ID NO: 750 - DNA, 403 bp, Arabidopsis thaliana
tctagagcggccgcccttttttttttttttttttttgtaacacggaaacttgaaatatttcattaaaatgctaaaaactattagcttatttatcaaaacacacaaattaaaaggtgaaagcaaacctatacacaaacgcaaacaaatgttcgaaacactaatcaaatttcacagtctctccatcgaaaagactccaaagttgatcaacgtcaaaagccaaggtgtcccccttttctgttgtcgtcgcttcaggaaccaaaatatctacctcttggctttcctctaggaatttctctaaccacatattatctccatcaatcaaattattcactagttggtctttcttcttatctttgttgtatatgatactattgtcacaaacattattgatgttaagtccaag

SEQ ID NO: 751 - DNA, 403 bp, Arabidopsis thaliana
gagtacaaactcgaggaagagttccctccagagaacctcaagaaacggttggatcagctagagaagaccaaaaccgagaagagaaagccagcagctgttcctgccaacaaaagaacccgagccagctacaacggtccaatgccaccagccaaagccgggcgtatcacaaacgcatacgtctcttccttcccgttcatcagatcaccctcattgtttctttgcttttagtataagtagtttacttttatatgatcaaaatgcgaaagaatagttgctttctcaaacttttccacatgaaaaagggttccaaaagagaaccgtatttcaaaaaaaaaaaaaaaaaaaaaaaaaaaaaaaaaaaaaaaaaaaaaaaaaaaaaaaaaaaaaaaaaaaaaaaaaaaaa

SEQ ID NO: 752 - DNA, 403 bp, Arabidopsis thaliana
agtagtaatgtccacttccctatcttggaccatgatgataacaaagaaactgcagcactgttctctaatacaagaagaaatatcctaaatcatgcacacacacttttacacacatactatgatgctctcttccctgtccaaagcaactctgaatatattccagctgctactctcatctacataccacaagttttgttgtctcaatcagaccagagaaaaatgtagaaaaaaaatttacaggagaaagtactggtcctaagttcttggcctggtcacaccggcctttctatatacactctttttgcaatcgtcaatctgtttttctactacttcaagatgcataggagacacgagtttttgtgtttccttcgctgttcttcttccagccccatctcctcttatg

SEQ ID NO: 753 - DNA, 403 bp, Arabidopsis thaliana
  misc_feature (1)...(403): n = A,T,C or G
gtttataaaacaaaatcgccttggattgaggaagctttcgtctattggagaaggaggagaaggtgtcgctgtcgcagaggagcaaccgcaagagactgtctctgttcctgtctctccttcagacatgctcaccatgtttttccaggctgatggaactttgaacgaagcagctattcctaatgtgacaagggccttacaggatattgatggagtttccaatttaaaggttcaggtttctgaaggtgttgccgtcgttgagcttttgaagcaaacaacggttcaagcaacaggagtggcgtcaaacttggtggagactatacaaggagctggatttaagttacagannttgaatctgagttttgaagatgacgatgaggttcttgtctagtgaaatcatcctttt

SEQ ID NO: 754 - DNA, 403 bp, Arabidopsis thaliana
tttttttgtttcaaattgatttaccatatcaagatggaaaaatattactttttgtaccctatgttttgaattaaaaatgacagtaagagagaagtgagactggagagtactgaaatactaattagctctgaacttcattgaatttgaagacacagtcatagagccgtcctccgagaaactctgctacttcaagatgcttcaccattccaatcttgagagaatcacacttgaactgagcataaaggtttgtctcaattccacgacccatgccttctacgatgactaagtcggcatcagatgaaaggtaagcaagctcctgtgatactcttgagagatcgataactggtaagtcattccccgaatttgcaatcagaagcttcgaagtatcaacacctagcaattg

SEQ ID NO: 755 - DNA, 403 bp, Arabidopsis thaliana
  misc_feature (1)...(403): n = A,T,C or G
tttttttttcagtaaatctcgtaaataataataacgataaatcagatacaaaaagaaaataaanaaatcaagaagaagacgaagaagaaaaaagaaagagtcagtgaattaacaaaaatcaagaagaggttcggttaatactaagtccttgaaagagccaatgaggtctcttcttctctcgatccaacgacgtcgtacttgagctgctcataggcgtgtttggtccgctactttcttggttattattgctgttattatatagattattattgctctgattattacaattatccgatgatgatctcattgacgttgttgacgagtagtccatgtccttgttcgttgtcgtggtcatagtagtagatgaagaagacaatccaatgctcaatgtcaattcgagttc

SEQ ID NO: 756 - DNA, 403 bp, Arabidopsis thaliana
ttttttttttttttttttttaatccaaacaaaatgcattattatatttaatttatttttcgaaatacaataggggctcgatatgaaatcaaagacaaaggagattattacatcaatgtgactaaacaagacccaatgtctcaaagagaggtgctatagaacttggtggcgaaagaaaggccttcctcggataacacgtcaagactctcaacggaaggttgtgctcgtgccactttagcaatagccttgtgttcctcttgagtacctccttctaggaacactcctactactttcccatctttaacccaatacgtcccaaactttggctttggagatttcgggtcattatctccaaacagtacagattctccaacgttttccccatagaattcccacgatagttt

SEQ ID NO: 757 - DNA, 403 bp, Arabidopsis thaliana
tataacccgagatccttcgggtattctcagttcttggaagaaaggtaccgcttgttgttcttggaacggtgtcacttgtctcaccactgaccgtgtctctgcactctctgtcgctggacaagccgatgttgctggaagcttcctctccggcactctctcgccgtcgttggctaaactcaagcaccttgatgggatttacttcaccgatctcaagaacatcactggttcttttcctcaattccttttccaattaccaaatcttaagtacgtatacattgagaataaccgtctctctggtcctcttccggctaacatcggtgcgctaagccagcttgaagcgttcagcctcgagggaaaccggttcaccggtccgatcccgagctcgatatctaatttgactcgg

SEQ ID NO: 758 - DNA, 403 bp, Arabidopsis thaliana
aagaagatgagttctctcatcatcatcttcaacattctccttctcctcacaactcaaacccacgcgcacaacgtcacgcgcctcctagcaaaccacccatcattctcttccttcagccatttcctaacacaaacacacctcgccgacgaaatcaaccggagaagaaccataaccgtttgcgcagtagataacgccgccatgtcagcattaacctctaaaggctatacactctcaactctcaaaaacattctctccctccacgtccttttagattacttcggaaccaaaaaactccaccagatccgtgacggctctgctctcgccgctactctgtttcaagccaccggagctgctcctggaacctcaggattcgttaacataacggatctgagaggtggtaaag

SEQ ID NO: 759 - DNA, 403 bp, Arabidopsis thaliana
  misc_feature (1)...(403): n = A,T,C or G
ccattttcgatttcttgaaggtgaatccagcgaatccttaatctcaagctccgannnnntgcaataaacaaaacagtagctagcagcagcagcaacacatgaactcgtgcaaatcccttatccgtgcctcaatctcttcctttccatttgttcctcttccaaaccctaatttctctatcaccttcatctccgttcgcgccttttctcctctctctgtccttcatccaaattcatcatgtattgtaacagctcgacgcacatttcatggagctgtggctctttcaccggagagcttaacggaagagtctcccaaggatactgtgaaaggattgttaacaaccaatcgtggtgaggcctcaagcttgatgaagatggagcggaggtgtagcttaagcaatggtga

SEQ ID NO: 760 - DNA, 403 bp, Arabidopsis thaliana
cattgaagctcctctgactctctctcaaagtacttctctgattcgtcattcctctgcttcgtttagtttaaagggtacggaactgacctgagaggtttgatttgaatctaaaaaggtttagttttttgttaagtttgatggggacagggaattctaaagaaaactggagacagtcatcgtttaggtcaacttctgcttcatcagcatcaccatcttcatcttcatgggcttctcaacaaagttatcctcagtatggtgcagaaagctataattaccctcctccaccttcttatgcccaacctcctgagtatacgcaacctcctcctcctttatatagtactcagccttactctgctccgtcttattctgcaccgccttctcaaagttatggtagtgataataa

SEQ ID NO: 761 - DNA, 402 bp, Arabidopsis thaliana
tttataaaaagacttatatttatatattggctctatggttcgcaataaaatctttcatatacatatatgctaattaattaatcatcactgttgaaatctggctctgctggtttctgaagtagcataggtggcattcgttccggcatccttggtttccttactgatccgctcctacgtattgtgcgcaagatatttgcagcaaaccgtgatgcgtatattgtagcaccgaggcttggggaacttccacaagcttctttagccaaagcatcctgcaaccgattctcttcttctttaagagactcttcgagtttcttcttaatgtatcttctccaagcggcttgtatgaagcaagcggcccaagtcttccattgttgtgagtagtacctgaaagtatgtcttagc

SEQ ID NO: 762 - DNA, 402 bp, Arabidopsis thaliana
aatgaaggtaaggcaggacaaagatacaagaaatcttcttatactctatacacatctttgagtaaatgatggacaatacatgaagtactactagacacaatacaattcactggcggtgaaaatcaatcaaattacaccaatattctcgatttgggtttctgtaaaagaatcaactatataaaactcaatatagaggcaccttcgtgttcagagaccagctgaaaccaaaccatgcaatgttacaattccaatcaatgtgttgtcttcattgaccactggtagaaactgtacaggcgatggcggtgattccatcttcttcatagcttcaactgccattgtttccggtccaattgtcctcggcttcctgttgcacatttctccaacactgagtttgaatattgc

SEQ ID NO: 763 - DNA, 402 bp, Arabidopsis thaliana
tcgagcggccgcccgggcaggtgtagctttctctctctctctctctctcgcgaagaagaagaagaagaaggagatcaaggaactcgaagtgtgtgtgtgtgtgtgtgtgtttgccttctcttgtcttttagttttttctctctttggctgtgatttcgtcggcgaagagagacatagatcggatatggcggctgataatacgggttcgaaatcgagctccgctgcggattcttacgttgggagcttgattagtttgacatctaagagtgagatcagatacgaagggatcctttacaatattaatacagatgaatccagtatcggacttcaaaacgttcgatcatttggaactgaaggaaggaaaaaagatggtccacaagttcctccaagtgacaaagttta

SEQ ID NO: 764 - DNA, 402 bp, Arabidopsis thaliana
tcgagcggccggccgggcaggtttgtagaacaacacacaactttatttctcctgttcaagactcctttattttctcttatgttcaaagagatgaatctgaatctgaagcaaatgggcaacatgatctatgaagatccaacaaggatccaagaagaagaagacattgttcaagaagtttcaacaacattctctgatgaagaagataactcatcatcttgttcattatcttcttccatgtgttctgattttacagaggatgatgatgatgatgatgtttcttcatcttcttcaaatggacctcttgaagatctctctgacctcatgtcacacctccctatcaagaggggattatcaaagttctatgaaggaaaatctcaatcattcacatcactaggaaatgtt

SEQ ID NO: 765 - DNA, 402 bp, Arabidopsis thaliana
ttcgtcaaaggaatcctgaggtttcgtatgatagctatgtggaatcaagtgtggcatcaaatgttccaagcttgaatcatggatatcgcccggaatctgtcagaccttggagccattggatttcatcatgggagaaccgaagtagcagctcagttcagaaacctttgccacttcaagcgaatctattcttgacttttaatactcaagtacgagcagactcaagtgcagagatgagaagccgtgattctaacgggcttaaccaaggattctcttcattctcggaggaaagtgcctttaattttccatcagtaaactttaaccatcttaacaatggcccaaaaggggcagttactaatggttctttgtgtgagagtgtgatgcatcagagtcttaaaaaccttc

SEQ ID NO: 766 - DNA, 402 bp, Arabidopsis thaliana
  misc_feature (1)...(402): n = A,T,C or G
atttccttccaggtgacagtgaagatcttaagcgacggtgtgaaacatgtggccttatcactgtcatcaacctgtttggtgtaattagcctacgacactcgtggattattgtacaatgcatccgatcatggaaggttcttgggaaagcaagattattttcaggtatacccacaaaatctttctgcattacaccaaccaatatacgaaaagaagttattggaacaaggttaagatatgaataaaccttggtctaccatgaaggaatactcgtcagggtcaggcagccgctcatttccataccaattaaggtgggctgggagctcnnnnaggagtgatgggctactactgtaatcttgaaactggagtccggtgtttgcaagaaaacgctcgccttgaagccaa

SEQ ID NO: 767 - DNA, 402 bp, Arabidopsis thaliana
  misc_feature (1)...(402): n = A,T,C or G
aaagaagctctttttttgcttacattgaagttaaaaaatcatcacttgttttgtttttgaagaaacacacataaagtttgtctttttacttctcaaatttggttgttttcactgaatttcaatcttgctttctgattcagattctgggttttcttcagaattcccagagaagttgttggaatngaatttttcacttttttgttcataaaagttctagtctttttagatgaacatggacaannnaacagagcaaaccctaaattacttacctttgggtcagagcgatccctttggcaatggcaatgaaggaacaattggagatttccttggaagatactgcaacaaccctcaggagatttcaccgttaactctacaatccttctctctgaattctcagatctc

SEQ ID NO: 768 - DNA, 402 bp, Arabidopsis thaliana
ccacgcgtccgctgaatgcttaagataataactataatctaagagtaattaattaaacgataagtggttaaatttgttgaggttaaaagtgaagcttcaatggcaagaggtcgaaagctgacgatgagccagagcgagaggtacctaggaagcagctatagttacggtgacagtaacggaaactccgccaccgacgaatcagagctcacggaggaggacatctggtcacacgccgtcgatcacagcccggagatgctggaatctcatggagcgtggaacacacgcgatgctgtggtgaggaatgggcgcgtgggtggtggtttgtcgctggcgtttgaggacgcgtcatcttcgccgaggatcgtgcaccagatacgtggcggaggagaaggaggaggaggt

SEQ ID NO: 769 - DNA, 402 bp, Arabidopsis thaliana
aaaaaatggcgcaacaatcgttgatctacagtttcgtagctcgcggcacggtgatcctcgttgagttcactgatttcaaaggtaatttcacctcaatcgctgctcagtgcctccagaagcttccgtcttcgaacaacaagttcacctacaactgcgacggtcataccttcaattaccttgtcgaagatggattcacctattgtgttgttgcggttgattctgctgggaggcaaattcccatgtcctttttggaaagagtaaaagaagattttaacaagcgatatggtggtggaaaggctgcaactgctcaagcaaacagcttgaataaggagtttggctctaaactgaaagagcatatgcagtattgcatggatcatcctgatgagattagcaagcttgcta

SEQ ID NO: 770 - DNA, 402 bp, Arabidopsis thaliana
ccacgcgtccggccaagtattgcccacaagcacttgtcaacatgatcagcaaccctgtgaactccactgttccaattgcagctgagatttttaagaaggctggtacctatgatgagaagaaattattcggtgtcaccactcttgatgttgtcagggctaggactttctatgctggaaaatcggatgtcaatgttgcagaggttaatgttccagttgttggtggtcatgctggcatcacgattcttcctctcttttctcaggctagccctcaagccaacttgtcggatgatttaatcagggccctcacaaagcgtacccaggacggagggacagaagtcgtggaggcaaaagctggaaagggttcagctacattgtcaatggcctatgcgggagcactctttg

SEQ ID NO: 771 - DNA, 402 bp, Arabidopsis thaliana
tttccgtttatcactctaatattgttaaagtttccactgataccaccgctctagtcatggctgaagctgaagatcagcaaaatttcgttgcacacaatggagatcaggtaccagatcaagggtcagatgagttgcataatgggttaccgtaccaggttcatgatgagacccttgttcaccaaccatacgaggttgaagatccgattcttgaacctcagcagtacgaggtaccagatccgactcttgaaccacagcagtacgaggtaccagatcagactcttgaacctcagcagtacgaggttgatgatcagttagagtatcatcaataccagttgcaggaccaggctaatgaagatgtccaagatcattcgcaagatgacctacaatatcagccacaaaatc

SEQ ID NO: 772 - DNA, 402 bp, Arabidopsis thaliana
ggtcgcggccgaggtaccggttttattccataaaacagcaaacggagtgactattgatccaagtgcagaaacaaattgtgctgaacaaggctctaaagttgaacttcccttctggcttgctcatgagttgcatttgaggcaagctgttaccataaaccttcctccctgttttgaccaaaagacgaggcttgaagttcaggctgatgctgcatacgtcgatcttagatcgcgatgtccatacttttatgaatttggatgcaagatagagccactggtcacagatagaacactgggaatcttgctatcgactgcgtttaagatcagatacaaagaggcactgacaaaagtatacacagcagctcacataacagcttccaagtacctgcccgggcggccgctcga

SEQ ID NO: 773 - DNA, 402 bp, Arabidopsis thaliana
aggtaccccggtaacaaaagctttctgcaattgtccactaagaccagttttccaaggacctatgctcttgacagctcttttccggcagaagaagataaccgctactataatcagtaaaccgacgaaagaagcaaccgcgataaccacatacagccatacatgttttgatccttttgactgtttattatcctgtggctgattcttagagatatcaggactagtactgcccttatcaggagaaggtacaggagggactaaaggtggtcttctcttctttgcattggttactgcagggaaagacccgctgcttcgaggtgaagcttcagttataatcccgggagaaggactaggagcggaaggagcaggctcagccgctaaattacctgcccgggcggccgctcg

SEQ ID NO: 774 - DNA, 402 bp, Arabidopsis thaliana
tcgagcggccgcccgggcaggtaccaacatctcttattgaatcctacgttactactactcattcaactggcaaattctcagcttcatatctgactgactcgaacaattcagtcgataaataacgttctcctccactaggaaaaataaccacaatgagtttccctacgttttcaggccgctttgcaacctttaacgcagccgcagctgaggctccagaggatattccaaccaataatccttctttgatagcaagaagcttggctgtttcaatagcttcctcaccagtcacttgaatgatttcgtcaacaatgcttaagtccaaattggctggaatttcaccagagcctattccttggatcaaatgtggacctggttttcctccgctgagtacctcggccgcga

SEQ ID NO: 775 - DNA, 402 bp, Arabidopsis thaliana
ctttttttttttttttttttttggacataagaacaagtttcttgattacattaactttttaggtttcgcatatagcaaagtattttacacacatataattaattactctcagagcatttgtaatcattaacttgaacaagtgaaattcaagaagatgattccttgaactcctgcaactgtttgaagttcatccatggcttcacccacactttggcttcaaaattcttagtctgatcaccttcttttgcttctagggttaagtggtacatcgttcctgcaactacctgctcccttgctttgacaatcttcttgaactcaagaattttgttctgttgtttgttatgttcttgaatggcaaatcgagcgagactctcgatctctccactgttctcggacgcgtgg

SEQ ID NO: 776 - DNA, 402 bp, Arabidopsis thaliana
actatagctattgtggaggccgtttctcctgagttgggtaaccggattcagcgtgtacgtgtgcagctacctggattgagtcaggagcttctccagaagttgagggctaagaatattaatttcgcagcacataatgctcaggaggaccaaggttctccaatactcaacttgattgggaatcttgcattccctgttattttgattggcggtttgttccttctctcgagaagatcctctggtggaatgggtggccctggtggtcctggcttcccactccaaattggtcagtcgaaagcaaagtttcagatggaaccaaacactggtgtaacttttgatgatgttgctggagtcgatgaagccaagcaagatttcatggaagtggtggagtttctgaagaagcct

SEQ ID NO: 777 - DNA, 402 bp, Arabidopsis thaliana
tttaaaaaagtactaataccaagagatagctttttcaacgaccattacaatggtacttcacataatataaaataaactaaaaacttccaaacaaataatttaacccaaagtcacaaaatagttcataacatgaaatttgggacgaatgcataataatgaacagtcaaacatagaataaagcaataatcagagttgttcaattcaaaaaaagaaagaaagaaaaagagagaaaagatatgagaatagtttcctcactttgccatcataactttgacaaactcttcataattgatctgaccatctccatcaacatcagcttctttgatcatctcatcaacttcttcatcagttaacttctcaccaagatttgtcattacatgtcttaactcagctgccgagatg

SEQ ID NO: 778 - DNA, 402 bp, Arabidopsis thaliana
tcaaacgacccatcaaggccataacttcctgatcctatgaacaaccatcaaaaacaagaaatagccaaggccaaacccacaaggacatcagaacgatgtattaaaaaatacaaaaccagagtccttcataagttgccatgtcttataacttgcgttgctactccatgtggagccgttcaagacctcattcactggctttcagccgctctccaagtagccgagaagaccacgagtcagccgcgctagcataccttggacatgggttactcacatttgagctattaaacatcaaaggctgctgcgcttgagtcatttctgagatatcttgtgtctggggatcaggttgtattggaaggacaagaactgttgcaggaggatgaagagttgtagcagattgttgaa

SEQ ID NO: 779 - DNA, 402 bp, Arabidopsis thaliana
tagttcaacttgtatcgagtaaagaaaccaatctctagatgtacaaaacaaattccaagctaacatcactaatcaagaaccctcggatatataaaaaggttttacatcacacaacgtgataacgacccaatgcataaatataatcaagcagcagcgagttgcttcttgttgtggtgagtagataaagagtcttcctcgtgtggatacatcacaagtttcgtcttagaagagattttgaatgaagaaggttcaagaaacagagacttcatcttcatcaacatcgccatctctctttgtagaaaacaacaatagttattgaaagtagaaacggtgacgtttaactcaaacccaattccgaacaagaagtcaagctcaagcatgttcatttcttctctgcttatt

SEQ ID NO: 780 - DNA, 402 bp, Arabidopsis thaliana
aattgcagacattatctgaggaggagcaattaaatttgagaaaggaaattcagtcagatttttccctagatgatgcacattcgcttggtggacaattattcacggatacaccaggacctagttctcctcttaatcaaacagaacttccagcttttgaagaggttgagctttcagacatagcggcatttgaaggaatatccccaggggccagtgggagtcagtctggccacagaacatcattgtccacaaacactaacccagtagatgttctgagtgtcaatgagttgttagaatcggtatcagaaactgctcggcaagttgcaagtctccctgtttcctccattcctgtaccttatgaccaaatgatgaaccagtgtgaagctcttgtgacgggtaagcagc

SEQ ID NO: 781 - DNA, 401 bp, Arabidopsis thaliana
ctttttttttttttttcatataaaagtgatttgattattaccattttatagaagctagattacaggaaaatggaattagcaatcagaacagtgaggagtgtggcggttgttagcaccggatcctggataatcgttaatatcctcaacggtcatcatcctccttgtcccttttcttctctcaggatcattttcaatacgtcccagatggctaatctgacgattcaattcctgtcccttggtttcaaagtctgttgatttctcaggtcttgcagtgattaggagaggcttccatgagatcatgagatagagaagagctaaaaccaagaacattcgatggtaaaagagttgtcttctcgccatttacttttgccacaaaaaaagacagagaatcggacgcgtgg

SEQ ID NO: 782 - DNA, 401 bp, Arabidopsis thaliana
atcactctttggaagatgttactccagctgagcttagtggatccgagtgtggcaccgaactctctgtaacttcttctcttgacacacttgagaagaagtcagacgctgagggtgcagagcccagggtagaagctaagcttttagaggatgacacttttaaaacagaccaagcagagttgatagaaattgatgttaaagacgcaacgtcaatgggtactgtagaggaccctaaggagaaagttgagaatgctaaggacgaagttgaaatttcagcgacacatcatgaaccggtcattagtacaccagattccaaaaagagacgggctgaagatgaatcagggcctcaagcttacgccttatctgagggagctttaactccgatgacaatcactgaatctcag

SEQ ID NO: 783 - DNA, 401 bp, Arabidopsis thaliana
  misc_feature (1)...(401): n = A,T,C or G
tctcccacagacaccagattctaccaatcatttgctcgaaaaggaatcatgggtcttaaagctggaacctttgtgcttctcttgttgggtttgatcttggtctctgacgctagatctttcgttgactccaccatctcagagaaagtttccaacaaggaagacgtttgcactctgtgtgaggaatatgttactgatgctctcagctaccttgagaaaaatgtcacacaagcggagatcatcgaagatcttcatgatcggtgttcccaattgcgcggatattcgcagcagtgcataagtttggtggattactatgttcctcttttcttcttacaactagagnnntttcaacctcattatttctgcaagaggatgaatctttgtggcaaagttgtagctcttgt

SEQ ID NO: 784 - DNA, 401 bp, Arabidopsis thaliana
ccacgcgtccgcgacggacttggctcaattcagtaccagcacatccagcctaacctagacatggatatgcgggtcaccattttggaggctgaattccgcaccttctccaacaacgtcatcaacaacatgcttgcgatgaagcgagcgcaagatgtcttactacgagccaacggctttgaccccgagaccctcctaccgatgatgtctcctcctgcagcctccatgaatcctcctgcttgaccacatacgacttaggatacttgcaagccactcaaccttgcggactacgatctttaaaacacaaattgccttcgatttatgtttttcaattttaataaattatgtttcagtcacaattttaaatataatttatcgtccaaaaaaaaaaaaaaaaaaaaaaa

SEQ ID NO: 785 - DNA, 401 bp, Arabidopsis thaliana
gcggccgcagctgaagaagcactgtatctatctacagagaaagtgaagaggaagaaaaggaagagaggatatagaaattaagctggcgacttttagtccgaggcgagcaatggcagagttacggcactcgagctctctcggtagccgatcttcttcttctccgttacgtgccgccggagatgaggattcttcatcgcctcatgtacacgatcactctcctaacggcggagacgacgaagatggtcgcccacgtcatccttctagagatcgagaccgtccgatctggtttcactctttgtttcctttcttcggtgatgatcctagggtttctcctcagaagaataaaatctcgcttctattgattttgattctcgctattgctagcttgatctcagtttatg

SEQ ID NO: 786 - DNA, 401 bp, Arabidopsis thaliana
gcggccgccaaaatcatgttgctaaaggatgaaaaagagcctcctctccccggaacaattgagaaagatctaacagagctggaagcaaaagagcgattgattagggaagagtttgaagataaattatatctgtggctcatccataaggtgactgaagagggcaagggtccaaatatattagatgaagatggacagggtgttctacacctagccgcagcgctggggtatgattgggcgataaagccaatcttagcagcaggagttagcatcaacttccgcgatgcaaatgggtggtctgctcttcactgggctgcattcagtggcagggaggatactgtcgctgtacttgtctcactgggtgctgatgctggagcattggcggacccatctccagaacatcc

SEQ ID NO: 787 - DNA, 401 bp, Arabidopsis thaliana
cctattggtaaaacattatcagcaaaattttagggcaagctagagtaaaatgaccctttttaaatgatatcttcaactattctttctttctgcacaacatccgattctcttaggcttctgtttctccagctttggacaaaatgtgattccgcaaataagtggtacagcaaagaagagtatataattcaagaccgtaaactccatccacgtgcagccaattcacgccgtattctcgtagctgcctctgctgtgtcattcaatggcggataactccaactttccgacatatcttcgaaacctgtaaatgagcggacaactcctcgctccctcaaagacttttggaattctgcaatcttccatttacagtgatcggctccaacaacgtacactggtttcccggt

SEQ ID NO: 788 - DNA, 401 bp, Arabidopsis thaliana
caatgcaggttttatgtggcacaacgactcgagtaagaatcgaaacaacacatgagtttatcttttgatttgcagttccatgatagtaaacaagcagatattgtcctccaaaggaacggttttattgaagggaaatgaatcaccagagttttgggataaaaacatggattttacttcttgtcggctatgaataatccccatttctgttcaccagatgcagtcctttcaagctttgccgaccatcctccaacaatgtcattgtaatcctcttctgagaagtcgctgatgaattcttccttttctttctccactttttctaattcacgcctgaggacttgtacaaactgatcagtacggtcctcagcgataacgtcgtcaaagcctgcgtctttcagcatctg

SEQ ID NO: 789 - DNA, 401 bp, Arabidopsis thaliana
ttttttttttttgctttcaaagtaaaatatcatttgaatttctttttgtacaaatttttttccctcatcgaaaccgactctccaaaaaaaaaaaactaaaagaaaaatatcgaaaatacccttcttttttcctatctctctcactgattaggtccaaatctctttctttactttacacaaatgaaccatacaaagaaatctgaccttcccaaatatttaatatctcttcaaaacctaactcttttatttttcctctccttaatacttacaaaataaccacaaaaaaacactagatacttaataaaacttaacccagaaaattgctccgttacctatttacactcttgaaaaaagcaaactccaaaaggatcatcgatctcctctttcccccctcaaagatg

SEQ ID NO: 790 - DNA, 401 bp, Arabidopsis thaliana
ttttttttttttttaaaatgaacattggagattaaacttgctctttgttcttgggaaattcaccactgacaaaccaactagagttgatgaaagaaactacagccattcatctcaaaatccaaagttcatatcgtttctcagaccttaagattctaccgttcggagtttccaagttgcaaagcttgacgaaagagtgaaacagaaacatgtagcatgctcacagatcgatcacacgagacagcttctggattcggtttagcaagaaatccccttgcttgattgttgcctggtaaagtgcattctttgcatcaggacggtttgtctccaaaacacctgcaaccttgtctatcttacagtgaagcttcccagcagcaatgaagcgcgacaactcctggtctatg

SEQ ID NO: 791 - DNA, 401 bp, Arabidopsis thaliana
ttttttttgatcaaacacaactcaataatataactttcaataaatacttggccaagccatgaacactgatagtctcacacaacaatacattgggatatgaccttaatggcttaaacggagcaactataaggaaagcttgaagaggccagagctattggtcatgtagaaattgtttaagattcgagagctttggtttgatctaagacaatttatctatgcaacaaaagtcttaccttttgatccaatctccacatcacctttcttctccaaaacgctagttctacaatcttcataaaacactacacaagccacccatttgatcatattcccaacacagatcaaacccacatagaaactcgtgtacaacactctgtttccattggaactctccgtgcatttga

SEQ ID NO: 792 - DNA, 401 bp, Arabidopsis thaliana
gggagacaaacaccgaagaatcttgagaggaagtattcacggattgctgataactaccgttccattgatgaggttaccgctgctctttcacatgccggtttggagtcctcgaatctcattgttggtatagatgtcaccaagagcaacgagtggacaggggcgagatcatttggtaggaagagtctgcatttcattggaactactccaaacccttatcaacaagctatttccatcattggaaagactttatcggtttttgatgaggataatttgatcccctgttatggatttggagatgctacaactcatgatcaggatgtcttcagtttcaatcccaatgatacatattgtaacgggtttgaagaagttctcatgtgttacagagagattgttccccagct

SEQ ID NO: 793 - DNA, 401 bp, Arabidopsis thaliana
gctactactaataaaagaagaagaatatgatgagaatcgtagcagggacataaaacattaggcttgtgttcatttcttcccatccacttcgactggttcaaccacttcagcttcaaacgtctctgcatcgtgagaatgtgccatctgctgttgctgcggctgcacctcagggcttgaccatttcccggaaagagctacatccatcatctcatatatcttcccacccagctctgctggattatcgggcgtgaacccactagaaactagtgctgcgtcatacataagatctatggctctcattgcatcttcgtcatttgggttactattgtaagcagcatttatgttcttgataattgagtggtcgggattgatctcaaacactcttctccctttcatgtagt

SEQ ID NO: 794 - DNA, 400 bp, Arabidopsis thaliana
  misc_feature (1)...(400): n = A,T,C or G
aaaccttttcttttagatgcaagaattttctttattaccaaatctaaatgtaacgaataatcacaaggcattcataacgcaacacaaatagcaaatgatttgtttgtgcgaaggattggggaatatttttgtgtatcttcggccattgattggactttaggctttttgtagcacctcctttgctttgtttacccatacgctgaatatgtcgtccgcgaacaaaacaaaatgcacctctttaaagtcagtagagaattgtttgatggttgnaatacctatcgcagcagcttcatcaaaaggatatccgtaaatcccacaagatatggcaggaaatgcaatgtatttgatattgttttcctttgcaactctcagactatttttgtacgaattggtgagagat

SEQ ID NO: 795 - DNA, 400 bp, Arabidopsis thaliana
ttttttttggctaaaaactagttcttgtttataaaaataaacatacatatagagaaagtaaggtgagaggtgatttattcgaaaattaagaaattaatatacaaggacattcattataaaaaaaaaaggcaagaatatacatatgtatagtatgtacaaagcattaaaacgaaacgattacaaacttagggaagaaagccgatgatgtaatgggaagaaggaggattaggggaggcagagtatgagtagagaccatggcggagtagagccggaggaggtggagaagattgccttaagaagattgtgacggcgtcagccaccaccaccaagaactccattgttatcttcgtaatctctatgcatagctcgattttctttatcaccatcctctctttctttc

SEQ ID NO: 796 - DNA, 400 bp, Arabidopsis thaliana
gtgttttattgagcttaacgatcttacaaaatagccacaaaatgcctgtggttgtcacagagtggaacaacaacaaaaaaaaattaagttagagagtgaattacaaatggtacgtatatgtagtagaacacatataggaggcgacaaaccatctttcaaaaccaaatcttcggaatttggcttaagacacaactcaaccagatttctcaatgaacctcagtgttttctcctcggttttgagttgaaacaaagccactttatggcaaagatgatataccttggggagatttctccatccaaaaggacgcttctctattgcttcatgtctgttttgaacacataaccaaagagtttcttcatatctagttatctattctctacagacaagcgtttcgtccaa

SEQ ID NO: 797 - DNA, 400 bp, Arabidopsis thaliana
  misc_feature (1)...(400): n = A,T,C or G
aaaaaaggtaaggctgtgtgagagagaacccaccaaagcgtgcacgagagagagaaaaaaaaaagctttgattttgtataaaatcccaccactgctctcttaccataccttcattacacatctctctttctctctctcgctctcagttttntgggattgtttctttaaaaggggttcttagggtttagtgaagctatagatttcaatttcatacatagttaacgtatagaaggaatcttgggttgatcaatggaaggttgtccaagaaacagagaaatcggtccaaaacttcttgatttgattccacaaggaaggaaatggnaccaagaagacaagaacaacacagatcaggagaagaaacttgagctaaggcttggaccacccggtggtgatgaagaag

SEQ ID NO: 798 - DNA, 400 bp, Arabidopsis thaliana
  misc_feature (1)...(400): n = A,T,C or G
gaagagattctgaagaaacgtaagagtctagctgaggaatctggtggtaagaagttcttcaagcggtctgagatcgagcagannnaaatccagaagcttcgagaggaagaacgacgcgagcacgagcttaaggctcagcggagagccgccgccgccgcttccggtggagatggaaaatcatccggctctgctcctggttcttctaacgcagctacgtctgcgtcttccaaatcctctgcatcggacgctgctgctatcgccgattcaaaagccctaaccgacgaaaacctaattctcccgaggcaggaagtgattcgtcgtttgagattccttaagcagccgatgactctcttcggagaagatgatcaatcgcggctcgatcgactcaagtacgttttga

SEQ ID NO: 799 - DNA, 400 bp, Arabidopsis thaliana
  misc_feature (1)...(400): n = A,T,C or G
ccactcctccttcactgactgaccatgcgatggggtgggcgagtctggctgatattgaggtgaagccgagtggggtggtagggggagtgcagatgccgttgcatttgtcgagtttgtatcagtcgaccaggagtcaggtcgagcagttgaccagtcgacagtcgagtcaacagagagaaatgcaactcatcgatcaagccatcaatcgactgaacgggtcgaacgacgacaagctgacggcgtgtcagtcgctgttgactcatctgtcgactgtcagtcattccacaccatctcatgttgcgtgtgttgacctgctcgagcactggctggccctccttcaagagcnnntccaccctccctccccctcctgctcccctctcctctctccccactccctcaa

SEQ ID NO: 800 - DNA, 400 bp, Arabidopsis thaliana
cggccgcacccacatcaaaagatctctcatttattcgtttcgtttctgctgttttgagtgtcgggttcgttttagctgtaatctttttttccggcgttcgatttgaaaaaatccggggaacaggtgatcggaatcacggctatacacgggatatcacggggtgttagctcacatgtccatattgtccgacagaagggttgtttaatcgaaactaatcctttgccgcacggaggacgtggagctctgccgtctgaaggcggcagcccttccgatctcctctttctcgccggtggcggttccagctttaacttcttttcctttaggttttaggagttagggtttgttagtgttttttccttcttctttttttggtgctcttgaatcgcttttttcttggggg

SEQ ID NO: 801 - DNA, 400 bp, Arabidopsis thaliana
ggtcgcggccgaggtactaaattctcttggggatcattcaacgaagcgactcctacagcgaatgaagctggtacgtttgcaagaaacgggcttgtggaacaaataagcatgacttgggacaaatctgactatttttggtatctaacagacattacaatcggttccggtgagacatttttgaagactggtgattcacctcttcttacagttatgtcagctggacatgctcttcatgtgtttgtcaatggtcagctttcaggaactgcttatggaggacttgaccacccaaaactaacctttagccagaagatcaaactacatgcaggtgtcaacaagattgctcttctgagtgttgcagtgggtctcccgaacgttggtacctgcccgggcggccgctcga

SEQ ID NO: 802 - DNA, 400 bp, Arabidopsis thaliana
gccgaggtacacactcatcgtaataaagtgtggcttctttctggttaggacaccgagttaaggtgtcgttgacggcaaaggagacgcatctacggcaaacttccgttgagacatctccacggcagttgaaaagtccggtgactctgtctggagcttggccgacggtggcgttttggaatccggtggagtaggaagcgttgcgggaagaaagagaagccaaaagggtcttgagattgttgttgtaagtgctgttacttgtgtaatttgccgtattttgacaggtgtggtatacgtaagtgggatcttgagcagaaactctgaaactcgtgagaaaggagaagaggaaaaggaagaagaaagaggagtaataagacataatacctgcccgggcggccgctcg

SEQ ID NO: 803 - DNA, 400 bp, Arabidopsis thaliana
ccacgcgtccgaaaaacgctcgtcttcttcttcttcttcttcttatattacttcttcctcccacacagacaaattttgtaacgaagacgggatcgcgataagatcccggtgatcgaaaagccctaagaagtaattttcaagggaaagggacttaaagatgcatacttttggttacagagcaaatgctctgctcactttcgcagtcacggctcttgctttcatttgcgcaatcgcgtccttctcagacaaattcagcaaccaaaatccttctgctgagatccagatacttaatatcaatcggtttaagaagcaatctcatggtaacgatgaggtcagcttgacactggacatatcagcagacttgcaatcactttttacttggaacaccaaacaggttttt

SEQ ID NO: 804 - DNA, 400 bp, Arabidopsis thaliana
agtatggtgatttatcgagttttctgttccataagagagaacacatgagcttctggatctccgggaggcagctatctgcaaacgtggcgatatgctttctcgcatagtcgatagcttctttggagtttttgcctcgtgctatttccagaaagtgtagactatgaagcttcatctcaagatcagaccttgcttcctttagtttgtcagagttcgaaacagcccaattaagagccggttcaagatctcgtctcttcatagcttctagtatccgatacatctccacgaaagattgtcttgtagaacattcagattcaccagtttcagcaacaaaacagtcaccaatgtcaaacattccttgacggtagaaaaagttggcgataatctggttaacgatatgagt

SEQ ID NO: 805 - DNA, 400 bp, Arabidopsis thaliana
atcaaaaaaagatatgctgctttatcgcatcattattgataaccaactctaacaaaaacaagaacacacacatactcgtgcattcttattattcagtgaagaatagttctaaagcaacattaactagagaagcatggatccacatcacgcattcaccttcgattcccaacccgcaaccacaatctctttcttagccttggtgttctcaaacgactccctagagaacaaagccttggcgtagttacgaacactggtcaagctctcagggacagaccagttcttgtaatgaccaagagcaacctcaagatggtaaagctttggtgctaaactcaaatccactgcagtaatcttctctccagctacaaaaggaccagaatgtgtcttcaagtgattctccaac

SEQ ID NO: 806 - DNA, 400 bp, Arabidopsis thaliana
tcgagcggccgcccgggcaggtctcttttctttctctcgttctcatctttctctttaagagattttgtaggtgacaatcaaaagtttgacaaaatggtgaagtttacagctgatgagcttcgaaggattatggactacaaacacaacatccgtaatatgtctgttattgctcatgtcgaccacgggaaatccactcttactgattctttggttgctgctgctggtatcattgcccaagaggttgctggtgatgttcgtatgactgataccagagctgatgaggctgaacgtggtatcactatcaagtccactggtatttctctctactacgagatgactgatgaatccttgaagagtttcactggagccagagacggaaatgagtacctcggccgcgacc

SEQ ID NO: 807 - DNA, 400 bp, Arabidopsis thaliana
aggtaccttaacaaccggcggccttacttgctaaagcaattgaacccatttatgggcaccaaggaggaactaattcaagtgtaataacttgctgcattccaaattgtgaaaaagaagctcttgcagttgcggctgccatggagaagggcaccacgcatcctattggaagagctgttgtagatcacagtgtgggtaaggatcttccttctatttttgttgaaagcttcgaatattttcctggtagaggccttactgctactgtcaacggtgttaagacagtagctgaagagagtagattacgaaaagcatcacttggttctatagagttcattacctcacttttcaaatctgaagatgaatctaaacagatcaaggatgctgtaaacgcgtcttcgtacct

SEQ ID NO: 808 - DNA, 400 bp, Arabidopsis thaliana
taagtgaaatcactactaattgcaaaaaagtcttacaaaggtttttgataataattaattggtattttttttttgaaaaatatggtctgcaattacaagtaacttgagaacagagtgcataatagcgaattgactaagcttagtcagaaaacttgtgtagactccttatttcttctcttctgttaaaggagcttgagcggctgctgactcctcctgtggtggcctcattgccgggaagaaaagaacctccttgatgttcagtgagtcggtcaaaagcatagagagtctgtctattcctaatccccagccacctgtaggagccaacccatattctaaagcattacaaaatgtttcatctaaagccatcgcttcatcgtctccagactgtcgatccttgagc

SEQ ID NO: 809 - DNA, 400 bp, Arabidopsis thaliana
tttgcaggtgaaaattaagtttatgaaatggaaaccaaactaataattttggttaagataaatatatgtttcttacggaagagacaatgattcctagtttaacatgaacttatctacatctcgacgttgtcccagtcaaatgtatttccttcgaaattgtaatccggttgttgcattcggttccttgccaatctgctcatcactgcaagcccttctaccattctatagagtgatgacaaccatccctctctagagatattatgttcctcaagcgactctgcaatctctttgtcgtgtttcccctcgagaacactgcgcagagtcacaactgcatcgtttgttctcttcaaaatgctgctgtcatcttcaatttcaaggctttgaagatcgttgtgcgacg

SEQ ID NO: 810 - DNA, 400 bp, Arabidopsis thaliana
  misc_feature (1)...(400): n = A,T,C or G
ttttttttttttttttttggtagcaactaaaagcttcttctctccaaaatttgacatttttccaacttctgttattattattaacatatgtaaannncttaactgtagtagttaaaatacgtatagatgcaacggtctaagcttctcgctatgtatgaatgccaaagcaattgcaaatgattgcagactagtcaactttgcttcgaattgaactaagtagagtcctccactaacattcacaatctttagtcctgttgtttcatgttttgacccctctatgaatagttcgaagtactggtctttccgtggttggcctttaagaagggtcaaggaacaacacaaatcccatcctccacagtcacaatttccttgagatttccatctctctatcaaactcgaa

SEQ ID NO: 811 - DNA, 400 bp, Arabidopsis thaliana
cctctagagcggccgcccttttttttttttttttttttttttttttaaaaccacgaaatccaacattttagttttttgagaagaaaaaaacagactgcgataaccgggaataggtacgcatgatgagatcggtttgatttagtattttaacagaacatttggtgagacaacttttaagaagagggagaaagagaaccggttacatcatttggtgactaacagagagagacagagcttgcaatattttccatcattcctcctctgcagcactagctgcgttaagatccacacttagatccagttcctttccggtgatcaatttatacatgttcaacacatcaacaacagttgtgtcaaagtgtattgtagcatcataactcgttgatatgaagcagttgtc

SEQ ID NO: 812 - DNA, 400 bp, Arabidopsis thaliana
ttttttcggcaaaaatgggtaaaagaaattagagaaaactgagtagttcaaacttgtctaacaattaaatctcttgcaagaacagcaaaggcatatcttaattgcataggaaacgagctttgacctaaccttagtcgtggagaaattgaaactgtcttaaacacagtagatccaaacgaacctaattgtcgagaacgcacacatcgccggaaaactaaagatatagagagagaaacgcatatcgttgactctcctcctttttcactctcttcatttattcttcccctcatcatcatcatcatcttcttctttaaccaaaaacacaacttacaagaaaactgttgaatctttgtatttatttacatctcctttgacctttaataagaatctgagtggttgg

SEQ ID NO: 813 - DNA, 400 bp, Arabidopsis thaliana
  misc_feature (1)...(400): n = A,T,C or G
gcggccgctttgaatataccactagtggtcgaggtggtccttaagaaacacaaggacatggaccatcatatgagttgaaatcaggagtcaaaccaaaccacaaattaataactacaatcaaaagaaatagngttttagccacacaaaaacaagcaaaaaaaaaagcaaaataacatgatccgagtaacataattgcccttctcagttccactccaccaccaaataacataacccgagtaaaatttgtatccaaaaaaacaagatcaccatgagaatatctttannnggactagccagtgaagcgaatgaagtctcctaagcaatcatagaaatgattgatattgattttctctctcccagcatagatagcttctgcagatccaccgttttctccttgcgc

SEQ ID NO: 814 - DNA, 400 bp, Arabidopsis thaliana
  misc_feature (1)...(400): n = A,T,C or G
ttttttttttttttgttagtaaacggtatagattcaagaattagtttctgtataactgttatgtacaacaccatgtggactgaatacatccgatgagtatatatacgaagtacaaacaccaatatacatttcaaacaacagcatggttgtagtcatggtaatggaatgtcttgtagatgaagtgtgatagccactttgaagctgcaaaacttaaaacagccgccacaagcactgcaattctagccacattcgacattgtcgtttgcttcaacaccgccatgactccgatcatagcaacggatgcgatttgtaagatcacctctagcgcattgagatatttgnnngctttcttgcagctgctgcagttctcaacatgcgaccaatacctgtcgaagagctg

SEQ ID NO: 815 - DNA, 400 bp, Arabidopsis thaliana
aatttgtctcgccagtgttcgatcctccgttctcatcatctccaccgatcctgctcacaatcttagtgatgcctttcagcaacgcttcactaaatctcccactttggttcaaggtttctctaatctctttgccatggaggtagatcctaccgttgaaactgatgacatggctggtacagacgggatggatggtttattctctgatttggcaaatgcgattcctggaatcgatgaggctatgagttttgctgagatgttgaagttggtgcaaacaatggattatgctactattgtgtttgacactgctcctactggacatactctccgcctgttacagtttccggccacactagaaaagggactttcgaagttgatgtcattgaagagtagatttggtggc

SEQ ID NO: 816 - DNA, 400 bp, Arabidopsis thaliana
gctaactacttcaacacttcttggtcagcggataatcctctatggtctacaacggctacgcagcccaccgatggctctagaccagtaccaccgccgatttcgtcagaacaagtcttcttcacaaacccacttcaacaaaatctgagaacagttccaaacacaaacacaactagtcccatttgttccgtcccaaccgacaagaaaaacggtcttgcgacaacacggaatccaaagaagagatctcgagtctcgagacgagcgcctacgactgttttgaccaccgacacatccaacttcagagccatggttcaagaattcacgggtaatccttcaactcctttcaccggattatcttcatcttttccaagatcacgatttgatctcttcggttcttcttctt

SEQ ID NO: 817 - DNA, 400 bp, Arabidopsis thaliana
tgcacgatgtccgatgctccgtcgtcttccccggatgccacggcgtcgcactggtgctatcactgcaacaaacgcgtcgtcgttgaaaccttagatgactttgtcgtgtgctgcgaatgtaacaaaggtttcgtcgagtcaattcaaccgactcccgccgcttattcatcgccggcgccaccgcagccactttccccagatctgaatgtagaagactccagtattggctcgcatttcctccagatgctccgcttgttagcccacgcgccttctcagcgttcaccaccacgacaccttgatgttttatcttacgaagatgatttcttcaggttggagctcaatagtagaaacgaaatcgacgatgacgaagacgaagatgaagatgatggagatgaagaag

SEQ ID NO: 818 - DNA, 399 bp, Arabidopsis thaliana
  misc_feature (1)...(399): n = A,T,C or G
catccgtagattatggatcatttcctacaaagctatcgacgaattcaaagaaactatcaagtcacaacaactgtatcttcttcccaataaaaagaaaccgcaaacagatagatcaagaagtacccacaacaatggaagtaaacagatcaggcagcttgaacatcagcagtggttgttgcaggagtagtctttgacaggtttgggatatacttccaacaacgtttgtgaactccgcttatcttctttgnagcttccgcagctcgcaatccatctttgtgaacaattccccaagcttttccatgtctaccatccttatagagattgatcttagtgatttcataagagattccattccagtgagctttagccatatggtatccgattccccaattaggtaag

SEQ ID NO: 819 - DNA, 399 bp, Arabidopsis thaliana
  misc_feature (1)...(399): n = A,T,C or G
tttttttttttttttttttttttttttttttttttttttttttttttttttttaattgacaaatccatagtatatttcgattgaaattggtgaccatattctctactctacaaccaaaatatctaaaaaaagaaaactaaatcaaaagttcttatattctaaacactctcaaggggattttgctttataattgttagagtgtaaggaacaaagccaagnnntagtatatagttacaacaaaacgacggtgtattggtcactcaggcagtctcagacggttgaaaaggaccaagaaactctgctcagggccaatatatagaaatccaagatctgcgcccttcacatatggtcccattccctttccattgagttttaagagcttgccctcgacccatcttg

SEQ ID NO: 820 - DNA, 399 bp, Arabidopsis thaliana
ttttttttttaaaaaagtaacaaacttcaacaaaatcttcacaatagtgtcaaggatcatccattacccataaaaaaaaaaactgaaaagttacgaaactcaacatgaatcacacacagagatttgattatttatcatacaagaggaagccaaactgaaaatgtgcttggttactagcagccactcattcatgaagatgctgcaactataggcatctgagttacccaatcaaatttgtctcgactgtgtttgcgagaagcttgcttcttgtctttgctgctgccaccacgtgaggaagagttgtctttagacttctgtcctttctttccagtcttcctgtggttgtctttgctcttggatttctgctgctgtttcttgcttcttgtgactgtgtgggag

SEQ ID NO: 821 - DNA, 399 bp, Arabidopsis thaliana
taacaaaagccaaacataactaaattatgattatccttgtaactgaaactccaatatcaaaaactgataaaagacaaccaagaaacaagaccggaaagataaatatttgcgataaccaaaacctataaaccaaactcatctcatgaaggtcttaagcttggtcttcaccctcagtgataaccttggttgcagaaacagccttagtcgacaggaaatcagtgtgctcttggtacggcgatctggagaatctagtctctttccagaactctggtgtaaggaacccatatgtcttctgtaagcaatcgaatgtagccttgacaaagtttccaagggttttggtagatcctcttgaagaagtaaagacatcatcaataccagcgaactgaagaaccttcttag

SEQ ID NO: 822 - DNA, 399 bp, Arabidopsis thaliana
  misc_feature (1)...(399): n = A,T,C or G
ttttttttagacggcaaagacagggatgaaatttgctgtacacaatatttatgtttttgatctttagattctttactagaacaccgataattgcagaacaaattaacatcatgggaaaaccagacgtggcccaacataaagatgaaacgaaagaaatgggcaaattctacttggttatccagtaaatgaatatgagnnntgtgcatacagccgcaacgagtgaaagaatgattgtatccatcgactttttcctctttatcgctgccagaatagtgttcaccgtaggtagacggctggcgacattgctaagctttgagttgatgcctccaaaagttgaacgttgaaacacaagtgtaccgagtgttgcctgagcttgtgaaatgacaccgtccatctgag

SEQ ID NO: 823 - DNA, 399 bp, Arabidopsis thaliana
  misc_feature (1)...(399): n = A,T,C or G
ctttttttttttttttttttttttgaagaaagtttggtcttttatgtaaaatagtttggtcttttatatatcacagattgcagacaggcattactcaaagtgaagccatgtaaacaatccatacatatataaaaataaagtcttcattactactaccaaaagccagaaaagaaaaagaaannnnaaaaaannaaaaaagctcagaagcatctaatcatcctaaagctggggaaatctcaatctactcaactacgtagcaagcattattgttgtaataattaggaactggtccaagataatcaacagtagcagatggcgtctgagacgggtatgcaaaagtgcttgcaggtagatgagtaagctgcacatacgtaccggtagcattacagaacgcccatg

SEQ ID NO: 824 - DNA, 399 bp, Arabidopsis thaliana
tcgagcggccgcccgggcaggtacacataaagagctgcattgatggtgttcgatgaattgtctaactgtgactatccttgacgagatatgtaacaacacagccaggaatctcataagactctgtttccacccaaaatcaggtcggaagatagttgcaggtaggaagctaatcaaacaagacaccttatttttcacgacgagatgttgaacccctgaagaatgttggacaccattttgatggataaaacattttcataggagaaatgatagagtccaggggaaaagttgtttagcttttcaagccttaccgtgtgcatggacaaatttcttattcactatctgtttttgtgtgtagtaagaatctgaattttatgggtgaatttgtacctcggccgcgac

SEQ ID NO: 825 - DNA, 399 bp, Arabidopsis thaliana
tcgagcggccgcccgggcaggtaccgtctttcggcattctcgagattggtaacaagaacttactcaatccagatgcattgaatacattagtcaatcccatttgagatttgacataatcttcaagtatgatagtaacaatctcagacaagtttgattcaagaaaatcattgatctctttaagtgcattgatagctggttgaaaggctgtgaagttaaagcaagtccctccagtggaatgacacaaccatatatcgttttgaaaatcatatgtatctagcattatacctctcacaccattcttaagctgattggtgatggagtcttcttgattctttggagagacaaggaatgaaccagttgccgaatttgcccccgtgattgcgtacctcggccgcgacc

SEQ ID NO: 826 - DNA, 399 bp, Arabidopsis thaliana
ggatcaatggagagtttgggaaacctggatatcaacctatcatatatattgatactccggtttcgattaatgaaataaatgcttattaccatattgctgagtgcgtggtcgttacagctgttagagatggtatgaaccttactccctacgaatatatcgtttgtagacaaggtttacttgggtctgaatcagactttagtggcccaaagaagagcatgttggttgcatcagagtttattggatgttccccttcgcttagtggggctatacgcgtaaacccatggaacgttgaagctactggagaagcactaaatgaggccctctcaatgagtgatgctgagaaacagctacggcatgagaaacatttccggtatgttagtactcacgatgtagcttatt

SEQ ID NO: 827 - DNA, 399 bp, Arabidopsis thaliana
  misc_feature (1)...(399): n = A,T,C or G
catggcaagaggtttgaagaagcatttgaagaggctcaatgctcctaagcattggatgcttgataaacttggtggtgcctttgcccccaagccgtcttctgggccacacaagtctagggagtgtttacccttggtccttatcatcaggaacaggttgaagtatgctctgacatacagagaagtgatttcgatcttgatgcaaaggcatattcaggttgatgggaaagtgaggactgacaagacttaccctgctggtttcatggatgttgtgtctatccccaaaacaaatgagaacttccgtcttttgtatgacaccaanngacgtttccgtctccactccatcaannatgaggaggctaagttcaagctttgcaaagtgagatcgatccaatttggtca

SEQ ID NO: 828 - DNA, 399 bp, Arabidopsis thaliana
  misc_feature (1)...(399): n = A,T,C or G
attaactccgtcgcaggtgatgaggagatacagtccgccttattacagtcctccgaggagaggatacggtggtcgaggtagaagtcctcctcctcctcctcctcgacgtggatatggtggtggtggtggtggtggtggacgtagaggatctagccatggaagtctcttggttcgtaacattcctcttgattgcagaccagaagagcttcgtgagccctttgagaggtttggacctgtgagagatgtctatatccccagagactattactcnnngcaaccgcgggggtttgcgtttgtggagtttgttgatgcatatgatgctggggaggctcaaagaagcatgaacaggagaagctttgctggaagagagataacggtggttgttgcttcagagtctat

SEQ ID NO: 829 - DNA, 399 bp, Arabidopsis thaliana
acaagctcggatttagaaaacatcgtcatcgttcatcttattctgaaaatcaaagcattgaacttattattttctcattccggacgagtcttgacgatgaaattctgacggctaatgggattcataacaacgggaggaccagcggttcttggccatgcttggaatttctcatccgttgctgcccaccattctttgttagagacagttcctggagtagtccctccaaagatcttattatcagagataactttgtcgaagatgtatgagattccgaaagaaccgatgagagcaccgattatgtacttggctttacctcctgatgccattttcttctaaagctttgccgattcagagacagtgaagcttaaacagtggacacctgcccgggcggccgctcga

SEQ ID NO: 830 - DNA, 399 bp, Arabidopsis thaliana
tttttttttttttttacctttgcaatcactcctctctaattacacagacaagcctgcatttttacatatagtacacatacaagcataaagcacgatctgttttcttaaatgtgtttcatcttacacgaggagattgagtgtaagaaggtaaaggcgatgcaccaggagtcatgtgcagcagaggccgatcatgactatatcttaccggagatttctgcataacagaagaatgatgaaatcttggagattccatttgggtgtgtttggttccaggtttagcaacggattctagctgttctaatgtgactaaaacctctgacatttttggccggagttttgcatcgggatttaagcattgcaatgcaagattagcagctgtgaaagctcccggacgcgtgg

SEQ ID NO: 831 - DNA, 399 bp, Arabidopsis thaliana
tttttttctcttgagaatctcactgaaaggcaatggagctgcaaatgaatcccttgatcgcttatgactatgatgatcctcttcaaagcttttcctcttcccaagagatggctctggcttactttcctctctgctgcttttaggagctgattttctttcgtcttccatttctcttcttctcgcccatggagccccgaaacctctttcctgattaccactatggttttcctctaacctacccttaattctatctcggagtctaccctgagaaggtaactcgcttctgtcccttcccctctcacttctcctgtcaaagtggtgaccctcttcgccattgcttctctcacgaagcttaattctaccctgaagacgactactgctaatggagcggacgcgtgg

SEQ ID NO: 832 - DNA, 399 bp, Arabidopsis thaliana
ttttttttttttgcataaactgaaactgacttattaaatttgaaagatcccatcagaatgcaaaagtctaaaaaaaactactgtacgaaatgatacaacaacagagtatatatcaatcgaaactgcaggctcgaatcgagtccaaacgccatcatatcaaaaatcagagaccttcgatactcgtattacttctccaggagctagctactctagccatagctcttgctaatgaatgcagccgtgataaatccaaatcgtaaaacccatacgagagactaaatactacagcgctattttctagaataggtcagaatattcactactgatatttctttacgtaatcataaaactgggtacaatttcttccaatgagaattcttacagaaaaagtacaaacat

SEQ ID NO: 833 - DNA, 399 bp, Arabidopsis thaliana
  misc_feature (1)...(399): n = A,T,C or G
tttttttttttttttataagaagagttatatcacaattagatacatacatacattatacatacatgtagatgtataacataaagccgggccaccacaacaaaaggccaccgaaactcttaacaaaaaaagaaggagaagagaaaactccgttttcgtttggtagggcaaaagcctagttttaacggaaattagcggtgctcttgtaagtcttaccgccgctccagttagccggagcaacgttccaagcatagatggtttcaccggtggtgtaagaagtgacccggaaagagagagattgaccatagagagaggaaaannnttggtaagaggctccccaattgtggctcatgcttatccaattcgtccggctacctttaacggccatgctcttgatgtct

SEQ ID NO: 834 - DNA, 399 bp, Arabidopsis thaliana
  misc_feature (1)...(399): n = A,T,C or G
gagatctgtttttgtttctagaagaaaacagcttgttttcaccgtctctgannctctgatttgatcggaatctaatgggtaaaaccaccgggaacagagattggactcagatctacgctatttacggaatcgaacaatggcagacactcgtcttccttctcttccatgctttcttcttctctcttctctctcttctcttcctcatctacttcgatcagatttgcttcttcctcgattccttcttcctctccggcgccgccagattagccgcgggtttcaccggtgctgtaaccgctctctccgcggtttgtctactcttcgccgcagctaatttcgtttactcagatgttccgcttcagtacgagatggctcaacgcatggttagctccgtcggtgact

SEQ ID NO: 835 - DNA, 399 bp, Arabidopsis thaliana
ttgtcagaaattggcgtccaagaagcagatgttaagaatatattctacctaagagaaatcgaggatagtgatgagcttgccttggctatggaactatatgtgcaaaggggaaaggccgtcatcattggcggcggtttcttagggcttgagataagttctgctctaagggctaataatcatgaagtgaccatggtttttccagaaccttggcttgtacaccggtttttcaccgctgagatagcttcattctatgagagttactatgccaacaagggaatcaaaatcatcaagggaactgtagcaactggatttagcaccaactcagatggagaggtcactgaggtgaaactagaggatggaagaaccctagaagctaacatagttgtcgctggtgtcggt

SEQ ID NO: 836 - DNA, 398 bp, Arabidopsis thaliana
  misc_feature (1)...(398): n = A,T,C or G
ttgatgttcttgtggataatgaggctggagattctgagtattatcatgttgaagatcgatatggacgtagaagtcaggagagagggaactcnnagtatgaccctgatttcagtgcaattgctgatggtgataaagaagcattacgtgaacaacgttttgattcatatgatcggagggaagacaggggatggggccatcgtcgagtttcttctgagagagaggatcgtttggacagaagggtttacgcagaagatgagagatcagagaacatactggaatcggatctgagatatcgtttggctaagcagagaaaaggcaatggtatgagattatcagtaggaggccatgactatgctgctcctgactcttcgatggacagaggatatagagagtctcgt

SEQ ID NO: 837 - DNA, 398 bp, Arabidopsis thaliana
gcggccgcgtttcttttctagctaatgtacatgaatatgactaaacaacaacagaaagcgataccgattaccgcttttgtctacatattaactgaaacaatgtacatgttattagacattacagaaattgaaaagcaactagtaagccaaagggatgtatttgctgacaagtctctctcttctcatagctgcccaagtttttcctgaagcatctgcattaactttggatgttgttccagtagctgacacagcttgtcacggtcacttaatagagcctgaatggcttcaggggacttgaagtaatcatgtaatgacattccagattcttgttgctgggaagtcccagctccttgctgaccttgaacagcatgatgctgttgctgttgctgcacctggga

SEQ ID NO: 838 - DNA, 398 bp, Arabidopsis thaliana
aacaacaccttattgatttgttgaagctaaactttatttagtacaatatcaagattacaacacaaggtcgctaatgatgaccagtaacttcatatctaccaagaaacaaaggaacaaagaaataatccagaaacgatccacacagcatttactgttcttgtcttgagtgctaaacgtttcttctttttgtttttttactttggtatttgctttctcagagccgcggagacagcttctgtgtagcttcacggtaatcataaactcctactcctcgttttcttcctaatctcccagcatcaacgtattgaacaagaagagggcaaggtgcgtactttgagtccccaagtccctcgtgcaacactttcattacggacaagcacacgtctagaccgattaag

SEQ ID NO: 839 - DNA, 398 bp, Arabidopsis thaliana
agaaggaggaggcaatggcggtgttatccaccatctactccatcaccagagcttcaacgcctactatggcgtctctaactaatgactcaccgtctccacttccttcttcttcaccgtcgaagcttccctctcctacttctccgtcaaagaaaccgttaaaactaagacaagtgagcaaacaaatgggaagtcaaaaccagcaacgacgaggcaacaagccttcgatagcacagattgagagagcttttggctctggatcatatcgtgattccgaaggggaaatggatatgaatacggtattcgatgagcttctattaggccatgctaataaattcgaaagtaagatcgagaagaagctacgggagattggcgaaatctttgtagctcgaacagagcct

SEQ ID NO: 840 - DNA, 398 bp, Arabidopsis thaliana
gaataaccctggcttgaccatttatcatgtaaaaagccatttgcagaaatatagaacggcaaggtataaaccggagacttcggaagttacaggtaaggagttaaaatactttaacataatactactgcactttttctaagctttaaagtattggtcactctctagaagaacctaaactctcgacaaacagcttacgaatgtatgaactttatttatttcttgcacaggagaacctcaagagaagaagatgacatctattgaagatatcaaatctcttgacatgaaaacgtaagaatcttcagtcttctgactgcataacaaaccagtaatctttcttcgtattcttcagatattcttgtatgtatattttgctagatgattatgttactatttctttt

SEQ ID NO: 841 - DNA, 398 bp, Arabidopsis thaliana
ttcaactaagagctgagtaagaaaaaaaaaggatcagaagcaacaaacaattgaacccatgattccataaacctgaaaaaaatgttataattaagtattcactgatgatattgcccttcttaatcatcgtgcttaatcttcttcaaggactgatcctgatgctcgaacggatcgatacaattctgctggattgtttgaaagtatgtctcggtgatagagagcagaaagtgttcaactacccgaagttttaccggttgcaagagtaactgaagatgaaaatcgggggacgagcactgcctcgttgcttacggatttcgaagctgctaactcttccaaaagcttccatgttgcttctcgtttggctacaacctcggtttcattcgcttcatcttcttgga

SEQ ID NO: 842 - DNA, 398 bp, Arabidopsis thaliana
aagtctgagatcaagaaatcataatctgcaagacttgcttaacctttatttcaacaagtcaaggaagtaaatgaaccaaaaatctgagtacaagggaatgaagggtatgttcagcatcatctcgtagctctcaaggaattcgaaagaaactataaatacggaactcaaattccgcttggtgtgggtaactcacaggcagtggtttttttcttttcgttattgtcacaagaaacagacaggtattaagcatatgcaagagatggatccagcttctaagctgctgactctttagcgatcttctctgcctttgcaaccacctcatcgatacctccaaccatgtaaaacgattgttcggaaagatcatcgtacttgccatccaacaaaccctggaaactgtt

SEQ ID NO: 843 - DNA, 398 bp, Arabidopsis thaliana
  misc_feature (1)...(398): n = A,T,C or G
cgagctcggtacctcgagcggccgcccgggcaggttggaatcgaagtatgaagatttggagttttcgtcgtgtttgatgactctctgaagaatatttcgggtctnnnnnctggggtcaaatttccggtgagcaagcttaaatccaataatttcttccggtgatcatttgcaaaaggcgatatgtacaattgaaggatagtaggagtaaaagctttatgaagaatctgaataaagtttccaccgaccgatgatgacggaagtttccgacgaagagatgttttcatgatgagtcggtgatagcgtagctgacgaagcgtcgttctcctgtcaaacacccacgttgcataacacgtgtttttaatttgcttttatcttatgctgttttgcaattagggggc

SEQ ID NO: 844 - DNA, 398 bp, Arabidopsis thaliana
cctctagagcggccgcccttttttttttttttttttagaaaaatgaaattttattattatgttaaaacgataatgttcataaaatggaggaaatcaaaatatagcggtgtcattccattattcagtccataattcatagtattcctatacaagacagaaaatgccaaaaatgccctctagccgaacaatatacaccgattcatatcgactcagttcgagctaatcggctcctgctccgatgcttcccacgacggtggccgtgaggaatcccaccgaacgtgaccggatcatagaccctgagacgcttagcctcagccggattcacaacacactccgacaaaaccaccttgtacctcatatgatcgtaacaatacgaataagtcatgtgtttctgtcgg

SEQ ID NO: 845 - DNA, 398 bp, Arabidopsis thaliana
aaagcacaacagctatagattcatgataagttgaaaaaggctctcccagtagttttaggatttcaacatataagctcacacacccttacacgatataaccataatcatatgagagataaaacaagcctaaagaaaaagaagaaaagaaagcgcaaaatttggcatgagtgtgatcgaatctaacaaccatcacagcttcaaagagacaagttatccttgcgggtcttttcaagatctattgctcccatatttgcgagcgacattagcatccaacagtgtatcccaaacatgtagctctccctttgagccaccaatagcaagcaagaaagggttgtccaccgcaaaggaaatggaaaacacagctccagcatttggttggtgtgtagcaatgcatgaag

SEQ ID NO: 846 - DNA, 398 bp, Arabidopsis thaliana
tttttttttttttttttttttgtttttttttgaatcatgattcttaagatttacagacaggaccggcattgaagtccacatatatttgtaatacaaaatctattatatacacacacaaaaatctgggatattctaatatttaacaacaactagcctccactatatttagaagagcccactcgaagcatcaccacgaccacacaaatctaagatcttttcctcttgtatttgtttttagcattactattttgatatatgcaaggtttagaccccaaaaaaaaagaagaaaaaatataattgatattttcaaaatttgagctccatctcttctaagccatgggaaacacattccaagacgaagttaatcaatagttcatcctctgctttttcatcaagtt

SEQ ID NO: 847 - DNA, 398 bp, Arabidopsis thaliana
ggatcctctagagcggccgccctttttttttttttttcaaacttatttgttgtatctaaatatattacaaagtttcaacccaaatttacaatcttctctggagagatacttcataaagcaaaaaccataaagttctaatcaagagaatctcactctacttaattaacaaagatcttttttaaaacatccttccaagctttgtgatgagtatgcttcttcaagacttttgattctgctgtttcttgtttttaaagttttaataagttcctcttttaagttggttcttgtggacgagctgcccaaagagaactaagagcacgaagtctatgaagatactctcctaaagctagtaaacctcgagccgattgtcttgtcgttaagatcttcgccatttgttt

SEQ ID NO: 848 - DNA, 398 bp, Arabidopsis thaliana
  misc_feature (1)...(398): n = A,T,C or G
ggatcctctagagcggccgccctttttttttttttttttttttttggagttactagaaaatcaatgacgtttttgtggtataaaattacacccgcagaaaannnaggggaaaagaaaaaagaaaaaagccagacatgcctggaagcgggacttacccaaatcgttgtgacataatgggaagaaaaacaaagcttaacgtacaaaagcgttgttgtcatgtaatgaaatcagcaagtggtttatcgacttccagagacaaaaaccaacttcactacttagaatcgtgcactttctttgagcaccattttccttcaagatcctactgtttcttattttttggctttttgcttcttcttatccaaagatgttaaaccagcacctaatcctgcaggagccag

SEQ ID NO: 849 - DNA, 398 bp, Arabidopsis thaliana
atctgatcgggatgagtaacatcgatctgattgggatgagtaaccgcgatctgatcgggatgagtaacagcgagcttctcaccgtcgagcctctcgatcttcaattcccttttgaattgaagaagcagatctcttgctctctctatttgacgaacaagaccgacaataatgttgcctttaaggttaagacgacgaatccgaaaaagtattgtgttaggcctaatactggagttgttctcccgaggtctacttgcgaagttcttgtgaccatgcaagctcaaaaggaagctccttccgatatgcagtgcaaggacaagtttctgcttcaaggtgtgatagctagtcctggtgtcacagccaaggaagttactcctgagatgtttagcaaagaggctgga

SEQ ID NO: 850 - DNA, 397 bp, Arabidopsis thaliana
agtgatgatgcaaaaaaacctatgatgatgtggttcttagggatgctgttgttttccatggtggccgagtcaaatgctcaactgtcagagaattactacgcctcgacatgtcctagcgtagagctcatcgttaagcaggcggttactacaaaattcaaacaaactgtcacaacggctcctgcaacgttgcggatgttctttcacgactgcttcgtcgagggatgtgatgcgtctgtgtttatagcatctgagaatgaagacgcagagaaagacgcagatgacaataaatctctcgccggagacggatttgacaccgtgattaaagctaaaaccgctgtagaatctcaatgtcccggagttgtgtcatgtgccgatatactagctctcgccgctagag

SEQ ID NO: 851 - DNA, 397 bp, Arabidopsis thaliana
agatatctgattttggcctcagtgcattacctgaacaaggagttaccatcctaaagacaacatgtggaactcccaattacgttgctcctgaggttctcagtcacaagggttacaatggtgccgttgcagatatttggtcctgtggggtcatcctttatgttcttatggcaggatatcttccatttgatgaaatggatctaccaactttatatagtaagatcgacaaagctgagttctcttgcccctcatattttgccctgggggcaaagtccttgattaatagaattttggatccaaatccagaaactcggattacaattgcagaaatcaggaaagatgagtggtttctaaaggattacactcctgtacaacttatcgattacgaacatgtaaacct

SEQ ID NO: 852 - DNA, 397 bp, Arabidopsis thaliana
ccacgcgtccgcgaaacccttcttcatcttcttcttctcctccacctaaccaatgggagcaattgatctctctttctcacagagtcttctcttctcttcgtcgcgttccaatctttcctcctccacacaccgttccgtctcttttttgccgccgggaagcaagtcacggtgtctgccgccgttgcgttcaatgagtcatgacgacgacacggcctcaaaggaggtgaagctatggggtggaaggttcgaagagagtgtcactgagaaagtggagaagttcactgagtcaatttcatttgataaggttctctacaagcaggacattatgggtagcaaagctcatgcttcaatgcttgctcaccaggggctaataactgatagcgataaagatagcatt

SEQ ID NO: 853 - DNA, 397 bp, Arabidopsis thaliana
gtttcctcttccatcagctgagaacaatgataggcttacacttcagctcaaggacatttccttggagttttcatggtccttagccagaatcaaagaagcgattccttatgattcaagcactctctgccgttctacgccggcttcatgttcagaggagacccttaaatcaattgcagttttggttgaagagcaaaatcttccaaaggaaaagatgtggctctcctctgggatctccacgtttctctggttatacaccagaattatagggttcaatccggctacagtagtcattaactctgagcttccatacgggtctggcctcggttcatcagcagctttatgtgtagctctcacagctgctctccttgcttcttctatttcagagaaaacccgtggt

SEQ ID NO: 854 - DNA, 397 bp, Arabidopsis thaliana
tcgtacccgatttgatttcactcgagataaaataattagtgcaaaaaagttctcaccatctttctccgtcttgtcggtcacgtttttgtcctcgtagctaaaaaaatcagctttctacaactccgtaaggtggaagcttgagattatgcagaagaaacgagagatctgtggttatagagacaaattagacaagaccttatcttctcctgaactcactaatcacgagactctcaaatctcttctcagaaaccagcttgaagagtgtgatgagaatatattggataaaagaacagatgatgtatccaagttacttagcaagcttaggagtgtttccatgactgatcatcaagtttctaaattaaccaacgatggtgattggaaattgaaacatgatctt

SEQ ID NO: 855 - DNA, 397 bp, Arabidopsis thaliana
aattttttggaaagcttatacgatggaatcggagacgatgacgccgccgacgacgactaagacaacaacaacgacgagaaaaccccgaaagcctcaacggaaagacacgatttctcgagaaacgccgttcgtttgtcaccggaagaggaggctcaagcgcgtggggttaaagatgatttgacggaacttggtcataccctcacgcgtcaatttcgtggtgtggctaactttctcgctccgttacctgatggatcttcttcttcttcctccgatctatcgaaccatcccaggtttaaccaatctcggtcttcagatcctggattgaatcaatcgcgttcttcagatcgggacgaatcgtgtgttggaagtgatacgccggagactggaattaggttta

SEQ ID NO: 856 - DNA, 397 bp, Arabidopsis thaliana
tttttttttaggaaattacttattgtggaccaagctctgactttgaggaagtctcagtaacaaagacaaattaactcaaaaaaaaaactgaaaataaaaaattcaagtatcagacgaccccaaaattttgacagagactgagacagcaagataagcaagattcaaatccaggatacaaaaccctctttggacactagaggttttagtttcgatggtgcgagctaacctctgaaccaacaactatcatcggatggatcactttgatcacccaacggtttgtttttatcccaatacccgtaagtccaggactcacagggtttctgatgatagagacataccaacactttcaagaagctcccgggactgcagccgctgcagtagcgtacatgtttgagtc

SEQ ID NO: 857 - DNA, 397 bp, Arabidopsis thaliana
acgtcctcaaagaccgaaaagtctataccagaaccagatgattgtttaaacttctgaccaagtcctttctcgaaatctagagtgataggtggcagtatatcttcctttgtcgctgtgagtttgcaatcttcggattctttagcaaagaaaatgacactaatccttccggagacggttgcatcaaacgtaaaggagacgagaaagcgacccggattatccgggtcgggttcaagcctaagagactccttcttgagattaacgtcgttacgaatcgtgacggctttctggtgttcaacgtaaggagtcggttgagccatcatgtgaccagcataagggtatctggccatcgccacgggagcccaagagtggttgtggtaaggatgcggtggatgatgtt

SEQ ID NO: 858 - DNA, 397 bp, Arabidopsis thaliana
ccccggatacagtgccgttagtggacatgttgtcaccgtttttggatgcacgggattcttgggcagatacctcgtctcaaagctcgccaaacttggtactcaggttatcattccctaccgtgacgaggacgaagcgcgagtcttcaaacccatgggtgacctcggccaaatagttcgaatggagtgggacattcgaaatgaggcccagattgctgaatgtttgaagcactcggatatcgtctataacttggtaggacgtgactatgagaccaaaacttttgactacaagtccgtgcacgtcgatggtgctgaacggatcgccaagattgcggctgaatctggcgtttctcgcttcgtgcacctgtcgcacctgaatgcctcccacaactcgaagtcg

SEQ ID NO: 859 - DNA, 397 bp, Arabidopsis thaliana
  misc_feature (1)...(397): n = A,T,C or G
ctttttttttttttttttttttttttgagtgtaaataattgaatgagaaaagaggagcccaaacatgttgtagcacaaactgcagtaccaaatgtagttggccactgacttatttgattcagcataaaagcataaacccaatctaagtgtagaagaagaaaaaaaaaagagtttggctaagcccctatagccatttatccttcccaccggatgttgaaagnnnataaataaagcccccctaactttgttgaacttctcttctggctacaaaaatagaagtgcgctttcttgacggcattgagatatcaaatgactcagtctgatatcctaaactccactcctaaaacgtctttcaccatctcatatgtcacaaatgcaatcgcaatcgatggtacaa

SEQ ID NO: 860 - DNA, 397 bp, Arabidopsis thaliana
  misc_feature (1)...(397): n = A,T,C or G
ttttttttttgaacattcgtaagattgttgaatattacttctcagctcacaattggtgactaattattgatgaacaacacaaaactcacaacataactcaaggaaactaattaaagcaccaatgtaaaaatatatantnnncgagaaaggcaaaacaaaaacaaagcataaagtggatttgggatagatgaggaatagaagcttaggtcatggaatcaacggtgaggatggtgctaagattcatgggatgcatgtattcaggagagccattgaggatttgttgagctatgattctacttgctttttctgatgggtgaaaaggatcccaaaaggcaaagagatctctgtttgggcaaagatttgataatggagtgcatagccctatcccattgtacgg

SEQ ID NO: 861 - DNA, 397 bp, Arabidopsis thaliana
  misc_feature (1)...(397): n = A,T,C or G
ttttttttttacataaatatttagttgaatttattaaaaataattatattagataaattgtacaaaacctacataccaagtcttatactaagttactagataacatcaaaacaagttcatgagagagaccgttaaaactttcagaaactcctactttcttgttgaacataaacttttctttagccttcttaaaattctcaaagtctccagctttagtagacacatctttactcaagatctnnnttcttagtttgtcacaagcacaatacttcacgtcgtacacatctacgtctttaaaggttgtaattgtagtcctcactcctacattctcccaacaaagagactttataagtcaaagatactgaaataaaatttaattgaaaaagagattacaaga

SEQ ID NO: 862 - DNA, 397 bp, Arabidopsis thaliana
  misc_feature (1)...(397): n = A,T,C or G
tttttttttttttggaatcaaacaagagaaaaaaaaaacgaaatgagtttattacacaagccagtttgagattctttcattgaccagttttaaactgcaccatagttctagtttctaaccatatgcacaagggactaataaagatcggatcgatatgatttgacctaaataccccttgaacccgggacatcgatccactcgagctgtagctcaacctctccacactccacgtgctggagtctaaggaacatattctggacaatcttgccttggttcaacacaatgtggcttgattcnnncaaacaattttttctgctcggctctatcttctttattatggtcccattaggaagtcctggtccgagctgatgggcaaatttaatagcttcaataaatg

SEQ ID NO: 863 - DNA, 397 bp, Arabidopsis thaliana
ggccgccctttttttttttttttgtataaaatcgatatcatttcttagtaagaggcaacactttctttgtatagaacaaaactaagatcatcagtctattgctatagttgtctttgtctattgctattcttttctctgtagttttctaaggactctattaaaacaagcaaactaaacgtgaacaaaagcaaaccagagtattaaggtagtgaattatatgatcggacaaggcggagtctcccagacatcaaacacattctcctcgctatgcaatgcaaaaaggcggtcgccaccaatggagaaatcacagattgagccaccatagcttcttcttagcctagaagttaagacccagtctggtccacagaacacagagatagaatcattcattgatgag

SEQ ID NO: 864 - DNA, 397 bp, Arabidopsis thaliana
  misc_feature (1)...(397): n = A,T,C or G
gctaccttacaatcgatcagacaatccttatgatgcagctgacaagtggcttctaaaagagaatctcccctttgcatatcggcagcaaattgttgaatttatattacaaaattctgggcagaaagacttcaactttaatccatcttttcgtgatcccttcaccggcgcaaatgcttatgtncctgnnnaagcatctcgtacagctgcaactccggcaaaacctttatacaagcacattccaaaaagaggtgtgctagttttcgatgctgctcaatatgacgggattctgaaaangatgacagagttcaatactactttacgatctgacgcagtaaacaatgacaagtccctgaccgaactcgaagtatccagagtaggcgcaatcgttaatatactg

SEQ ID NO: 865 - DNA, 397 bp, Arabidopsis thaliana
tttttttttggaggtaaactctattttggatcaacaaatatgaacaagagtagtagtttgttggggacaggacataactgaaacaaagttttcagacacaaatgtaagaaaaaatgaaatctttgaagaagagactcagtaaacttcagcagcaaagttggtagtgggaagtctctgtcgcttctcaatgtaagccataggaaaccaaccagctttgcctttgcattctccttcagcccaaccggtttggctcacctttcggacaacgatgtaatctcctttgtccaagtctaactctttctctgaagcagcggaaaatggatgaatcacttcagcaagaaagtatgacgttttctctgagccgttctctgttggaatcgcaggaggagcagattct

SEQ ID NO: 866 - DNA, 397 bp, Arabidopsis thaliana
tcgctcttcccttttaattttcatcccattttcttgaaggagatttctaattattctgtgatctaaagtctgaagctttgtttggttgcatctcgatgatgatgatgatgatggttgattgtaaatgggtagtttcggtttggttgtagcagaagctaagtttgtcaagttaataagagtattttagttttttttttgttaaatcgatttgtgggttcatcatcctacgatcgaaagtttccatctttgataatttgagattctggggatttttactagaatttctagttttttttttggtttgttgatttcgtagctagaagaaatcgatctaggtgtgtatatatatatctattcaatcgaattttagtgaatcgattggcgatcttggtgagag

SEQ ID NO: 867 - DNA, 397 bp, Arabidopsis thaliana
  misc_feature (1)...(397): n = A,T,C or G
ggatcctctagagcggccgccctttttttttttttttaaagatgagagaatacatggaaacttctccgattggtcaatgacaaaggtttttgaaagttcaaaaaaaaaaaaagacataaaccagtcagaccaaaacnnngaggaagagaaacaaaccctagagacgattctctccgcaactgttaaaaatttcagttgcagagagattaatataagacactgaaattgaaagacaaactcctaaaagaaaaagtcttctctttgctttgtttaagattcggacaatttgctaatcgcatcccaatcaatctccacagaaggaaacttctccagcccgaaactcccaatctcatcaaatccagaatccgaaaagtccaagaacgtagtaataccagat

SEQ ID NO: 868 - DNA, 397 bp, Arabidopsis thaliana
tggatcctctagagcggccgcccttttttttttttttttttgatcacaaaaggagacgattctcaggccctgatccattcaaatatgtatgtgcacaacagtgtacgtgtatatatagtctatagacatttaattcaatcttaaagaggaaccatcatcacacgcatagccacagaaatactcctcaaagatgctaatctcagactatataaaccagcattgtgtgacacagtatcccgcaaacaaaaacactgaatttcattcatgaatgtaacctacctgcgatggctgcaacctgaacctccatttgtgccgccctgactttagaacccgtggctcggtggaagaactgttctctcgacaacaacctcacattcctcaaatactgatcaaaggg

SEQ ID NO: 869 - DNA, 397 bp, Arabidopsis thaliana
gagagagaagaaaaaaagaattacaattaataagaacaagatcaagaatcaagaatcaagaaaatgggaagagcaccgtgttgtgataaggccaacgtgaagaaagggccttggtctcctgaggaagacgccaaactcaaagattacatcgagaatagtggcacaggaggcaactggattgctttgcctcagaaaattggtttaaggagatgtgggaagagttgcaggctaaggtggctcaactatttgagaccaaacatcaaacatggtggcttctccgaggaagaagacaacatcatttgtaacctctatgttactattggtagcaggtggtctataattgctgcacaattgccgggaagaaccgacaacgatatcaaaaactattggaacacga

SEQ ID NO: 870 - DNA, 397 bp, Arabidopsis thaliana
  misc_feature (1)...(397): n = A,T,C or G
gggaaaacagttccaaggaagaaaggttgggattttgattgctgtcattggtggagctgttcttgttcttgtgttttttgtattagttatcctcctcctgttatgcacaaaccgctgctctagctgttgttcaagagaaaagtcagtgccgcaaactcggcttaaggttgtgacagataactcacacaccngtctctcctctgaagttcttgctagtgcaaggttaatctctcaaacagcaaagctaggtgcacagggtgtgccctcatgccggtccttttcttttgaagatttaaaggaagccacagacgattttgattcatcacgtttcttnnntgaaggctcccttggaaagctatacagaggaacactggaaaatggaagttccatagctatc

SEQ ID NO: 871 - DNA, 397 bp, Arabidopsis thaliana
cgtccttcatattggacaagaaggctggtcctctccataaagcttctaagtatctagcagtccatctcaggtttgaaattgatatggtggctcattctctctgttacttcggaggaggcgatgcggaaaaggcagagcttgatgcttaccgagaaatgcatttcccaacgttggcaaatctaacaaagacgaaaaaaatgccatctccagacgatctgaggacagaaggactttgtcctttatcacctgaagaagccgtgcttatgcttgcgggtctgggttttagtcggaagacacgtgttttcgtcgctggtgcgaatatatatggtgggaataaacggttagcagctttaacgagtctctacccgaatctagtcaccaaagagaatgtactctc

SEQ ID NO: 872 - DNA, 396 bp, Arabidopsis thaliana
tttcagtaggacaacagactacatgaaaagtataagatgttcatcactcaaaagactttcatatacacacaaaggggaaacaccatccacatgagacaggacaagaacttattttgatgtgatcaaacccaattcaataaccaaatgaaccaaatctcatacttataattgatatatatgtcaagcaaaaaagcgggtaggaagatcaatgtgcgctaacgaggaaagggttttggcaaactccgcactcaatggtctctgatcctgagactggaacctggacctgtaagtgcacagtgcatgttggacaagctacttctttcatccgcctcccagatccttccctcaaaccagacgaagacttgcggtttctctccatttcctcctgtaactttc

SEQ ID NO: 873 - DNA, 396 bp, Arabidopsis thaliana
ctttttttttttttttgttaaaaaataattatcatatacaacatagaaaaaagtaatacaactgtagtgtaatatgtttttggtgatttaacccaattatcttctaaagaatacaaattgatggctaaatatatacgtgtaataattaaaggatggccaaaattgagaagaagaacaatgaaagtgagatagagagagaataagcagcagaagtcgtcgacgtgtttggtctttgagatggtatgtttgtcgcctctgggtcaaacgaagaagctggcggtctagccgaggaggaggaacggttcgatggaagcgtccgagccgatgtctcaccggtgtaacaatcagattctttccaccccagaatcagtttctcacgatcaaagacaatgcgat

SEQ ID NO: 874 - DNA, 396 bp, Arabidopsis thaliana
ttttttttcgaacacaacaacatcgtaatactacatttcaagctagtttaattatgataaatattgcttgatacattcattacaaacgaacatattgacactttacaagaaaaaacccacacttgcttaagcgttcgttacaagacgcaaaccaacgaaacagatcacttccaaaaactactaagtcgttacaaacaacaatttggactccagaatccggtttcataggctaaccggtatccactatacaaataacacactctgtacgagcatagaaccggattcgtttctttcatatacggttcccaagaattcacatggcaaagaaccatcctctagttagccgctatgtcacctacgacttcccggtccgtttacgtttgttcttggtgagag

SEQ ID NO: 875 - DNA, 396 bp, Arabidopsis thaliana
tcgagcggccgcccgggcaggtacttgtcctttgttactgtctttgccttcttccacattccccatataaactttccatcatagagggcaacatgagagatgatagcgcaaagagaaccgaagctgagtccatagagcaacgcgaacatcacactcaaatagagcttgctgtaaccgttgtaagcgtctagattgatatcgaaattcttctcattgaggatacgggtaatgttataggtgtgtccagtctgatcaaaggtgtgtgaagtatagaatggaaacttctgagcatcataagcattagtccagtagaagataggtagaacaatgtataaaaagatgaagaatcctccaaagaaattggcaatggcgaagaatggtacctcggccgcgacc

SEQ ID NO: 876 - DNA, 396 bp, Arabidopsis thaliana
cgcgccagaatcgagcggccgcccgggcaggtacagtttcttcctgtcttctcttgtgagctcagtgccaatgctgttgatagtgatattcactgctctcctgtcggcttcaaaggccaaaaggtcagacataatctctgctgttgcgccaccaagtttctgacagaagttgtaaaaatcctcaaggtatgctttgtagagggtattcctcataatctctatgttcatgtcatcgagatcctctgatgttaggcattcagaaaagtatggagccagaggagtgtccacaagcaccaacctatagagttcccgcatgttctgagcaacagctagtgtagcaatactgtcaaacatgcctaaagggtgacacttctcgatcaactcttgaacatctct

SEQ ID NO: 877 - DNA, 396 bp, Arabidopsis thaliana
  misc_feature (1)...(396): n = A,T,C or G
tcttcaccttcaagaatcctctgttttgctcttgccttatccgctgcttctctctccctctctttcgcttcttcccacgattactccatcgttggatactcccccgaggatttggaatctcatgacaaactcatagaactcttcgaaaactggatctcaaattttgagaaagcttatgaaaccgttgaagagaagtttcttaggttcgaagttttcaaggataatctaaagcacatcgatgagactaacaagaaagggaaaagctactggctcgggctcaacgagtttgcggatttgagccatgnnnagttcaagaaaatgtatttagggctcaagactgatatagtgagacgcgatgaagaaagatcttacgcagagttcgcttacagggacgtc

SEQ ID NO: 878 - DNA, 396 bp, Arabidopsis thaliana
  misc_feature (1)...(396): n = A,T,C or G
aatacagaggcgttgcaaggcatcaccataatgggagatgggaagctagaattggaagggtgtttggtaataaatatctatatcttggaacatacggtatttcattccattatccttactttatagtaatatttttatgaaatgtgtaaattcatactttagtacaatccagttcctagcaaatccaaatcttgaaatttgggattagtataaaatgggagttattctctgttctcctgttaagtgggactctagtagacgatgacatggtatcatatcttatactacacatataaaatagaaatgatattaaaaatggtagggaacaaagnnggtcacgttatgcatgaatgtagtcaaacgaacaactctttaagttttttttttcttgacaac

SEQ ID NO: 879 - DNA, 396 bp, Arabidopsis thaliana
ggcgattggccgtcgcggcgaaacgtggtggcttgtgccggcgtttgtcgtagctggaggattctcaccaaggagattgtagctgttcctgaattctcctctaaattgactttccctatctccctcaagcagtctggtccaagagattctctagttcaatgctttataaaacgtaatcgaaatactcaatcgtatcatctctatctcggattaactacctctttgacggataacgggaagtttcttcttgctgcttctaagctgaagcgcgcaacttgcactgattacatcatctctttgcgttcagacgatatctcaaagagaagcaacgcgtatcttgggagaatgagatcgaacttccttggaacaaaattcacggtctttgatggtagtcag

SEQ ID NO: 880 - DNA, 396 bp, Arabidopsis thaliana
  misc_feature (1)...(396): n = A,T,C or G
agacatttgatcttgatgactttgagcttccagacaatgagatctttcagggtaattacgttgatcatcatgttagtacaaaagagcagatcacccttcaggataccatggatggcgttgtatactcaacgtcacaatttggattagatgagcgatttggtgatggcgacacttctcaagctgctttggatcttgatgaggcagtattccaggacaaggatgttattggatccgacgatgagggagttccaggtattgatcacaatgcgtatctggatgcgnnagcacccgggataaaggattcgatggaaggagtctctgaagccatgcccatggattttaatgaagagcaggttgaagatcttgctatgaataatgagttcatcgaagatgctc

SEQ ID NO: 881 - DNA, 396 bp, Arabidopsis thaliana
  misc_feature (1)...(396): n = A,T,C or G
ccgaggtacaccaggaagctgagggaattgatagtttattgtgtttgcaagattaagtccctccaaccaggtctcctcagttggggtgcctatgacactgcagattttgtagatttcatctgcttcactagccccaggaaaaatggggcgaagagacaacaactcagccataatagctcccatcgcccacatatcaactttcgatgtgtatacatatgactgtagaagtacttcaggagccctgtaccagcgtgtagaaacatactcggtaaaaggtggactcgaattaacctcacgtgccannncaaaatcagcaatcttaatgatgtctttagagactaacagattttctggcttaagatcgcggtggaagtacctgcccgggcggccgctcga

SEQ ID NO: 882 - DNA, 396 bp, Arabidopsis thaliana
tcgagcggccgcccgggcaggtacaagccacacttttaagttcttctacatatattagatggtggtgaggatgagactaggaaagattgtggaagacttgaagtcgaagataaagactggtctaaggatgcggaagagatcatcattatcatcaccatcatattcatcttcatcatcatcatcatcatcatcatcatcgtatgagaagatagagaagagtgagagtatgagatttgagttgagaagcagaaaggctcacaaaattatccaagaaacccttcaaattgctgactctcccacttcaagaacttatgctttctgatttcatctttttaacatccaaaacatattcatacatacacatacataaggatttacgtgtacctcggccgcgac

SEQ ID NO: 883 - DNA, 396 bp, Arabidopsis thaliana
gacagagagcaaaacccagttccgacacacttatacatcaatgacccacatgtcggaagcagagcatttttcatgtgaactaaagaaagaaggtagttagtaacaactctgatgacataagagagacacacccgaaatttcaatccactccctttctcttttcgtgaagctgactacgtaacttgtagtagtgcatgcttagctattctttgaaaggttaaaatcttcttctccggtttttactaatcggattttattcctccgttatgcttgttgctcttcttcgacgactccttgatctgctcaagaagcttcttttggaatctgtaacccttgtcagttccataaatgtaatcacagtacgtgaacactgaagcgaagttgctttgactttgt

SEQ ID NO: 884 - DNA, 396 bp, Arabidopsis thaliana
cctctagagcggccgccctttttttttttttttttttttttttttgagaaaatattattctctaaatcattgaggagatgagtttgaatacaaacctagaaaggtacagagcattgtacaaagctatcaagtcaacaaataacaacttagaagaagttgaccaaaaacaaaaaaaaaacaaaaaaaacaacaacttagaagaacagccacactcatcgtctctcatattcagactttaatcatgtggcttctttttcaggatctgatctgtgaaccggatctctgatatctcgtccccttgagatgatgcttccttgatgctctctggttgtgtaaagatccggtgacaggcactggaggtaggttgatgactcggccttgcacgaaattccgggg

SEQ ID NO: 885 - DNA, 396 bp, Arabidopsis thaliana
acgtcgcatgcacgcgtacgtaagcttggatcctctagagcggccgcccttttttttttttttttttttttttttttaaagaaagaaaaggtgtctctatcggattaaaccatctcaaatgttcataaacttctcattggatcataattgtaccactacaacaacctcggtgtctgacactgtgagctccaacaacagtcttaaaacatagacatatccggaggagctccatacatactcttccatgaatacggtatctgccatttcccaccttcttccccatggaacttgtcaggagtcagacccataagcttagatgaagcctcagctagaagaaatgcttcaggaatgttgtctccttcagaacagtaacatagcaggcatgtcatcttcaag

SEQ ID NO: 886 - DNA, 396 bp, Arabidopsis thaliana
  misc_feature (1)...(396): n = A,T,C or G
tttttttttttaaaatgtgcagtagatatcttaaagagggaagctcctaatagcaaatcacacggtgggtttaagactaaccacaaaagacaacatacataaacttctagaaaacaacaacatttagagataatgaagcaaagtctcacctatgcttcagatttgatggtagcacttgcattttgcgcactgcggaagaagaagcattactctcaagaagccattcccttgcgcaaatcagagcctccactgtctcgggcctcagtgacgtcttgtactcatccatttccctcggttccatgtcaaagacatagtcaaaggctgcagctgaaaccgggattgnnnggatgtctctagccatctttgacaaggtcgggtacttgagcttgttctgtt

SEQ ID NO: 887 - DNA, 396 bp, Arabidopsis thaliana
ttggatcctctagagcggccgcccttttttttttttttttttttttttttttttttctggagttatatttattttataagaaaaatacaacccaagatcaagagtaaagcttttacacttgccaaacggaagaatcctaaaccaagtgattcagaaatctctatgagttccctatgggtaccaaaaaaaaacaattgagagtttaagcagcaggaggcctgagttcttgatcacgagatgtgtcacgaacggattgaggcatataatgccacattggcatgtaaccgtaacttggataaacagccattttgttgtggttaaatgcagctggaatatgaggtatgaaccctgaagatggagccgtcatagactttaactgttgttctgtcttctctt

SEQ ID NO: 888 - DNA, 396 bp, Arabidopsis thaliana
  misc_feature (1)...(396): n = A,T,C or G
ggatcctctagagcggccgcccttttttttttttttttttttttttttttttttttttgataggtaaccaaaattaattaaggtatttttcttccaaattaaatactagaggtattaaacgtccaaattaaaaataaatggcggtttttcactctaccatatatcaatcccttccccatcccctttttttactcttcttcatctccctctctttctatatatagatgatcaatatatctctgtctatatctacagctcaaatcataacagaggaacagctccaatccaacaatggtgattttgatgtggtgacacatgtcgtatatgtaaatgtgtgtagnnnaggaggcagggctatagagcgagtcgtgtctttatcggcttgagtttcaaccc

SEQ ID NO: 889 - DNA, 396 bp, Arabidopsis thaliana
aagaacagttaatcgttgctttgtccaagaagacgctaaaagagctcccaagttaacttattgccaatcatcttcatcctcaactgcttcttcaactaagcaagtggaagtttctggttcttctcctcgagtttctgttgaaccacggactcaatcatcttgtgcaggtttcatgcctcttcctcgaaacccgaatttccctgatctgttaccccacaacaccagactgtggagtcatcctcatcatcagtttcaggtgaataagaagcagccattggaggatgaggttaacaatcaaggtgtatctgagaagaagtctgaattgggagctggagagaaacaaggaaagtcttttaattccgaaagctttcaagagtttatagagttgatggagac

SEQ ID NO: 890 - DNA, 396 bp, Arabidopsis thaliana
cactctaggtctgactctcagatcctcctcctcctcttctcttccattcacctgcaactcccgcttctgctctcctcctcctccttcttcgtcctttagactctacaaacgattccatttccttaaaccatgctcttccctaaagcaaaccaagaagaagaagcaacagtctctcccatctaccgctccgcctcctcagagtctccggtggttcttcaattctaaatccactaatgatgaaaacgacgaagatgatgttaagtctgagagcgatgatgatggcggatcggaaggtgatgctgctattaagggtactatcttagccggagttttgttgattggtacagttggtggattcgccggcgttggatatgtctacagggatcagatcaatac

SEQ ID NO: 891 - DNA, 396 bp, Arabidopsis thaliana
atggattccaatttctctcgccatggttcttcctccgaaggtgattttggtttcgctttcaatgacagtaacttctccgatcgtttgctccggatcgagatcttgggtgggccttcggattctaggtctgatgctgaaggatgtacgagtattgccgattgggctcgtcatcgcaagaggagaagagaggacaacaagaaggacaatggtgttgcgatttcagacattgtggcatgtgctgaagaacagattttaaccgataacaaccaacctgatatggatgatgctcctggtggtgataatcttgacgatgaaggagaggcaatggttgaagaggctttatcaggtgatgatgatgcatctagtgagccaaactggggtattgattgttctact

SEQ ID NO: 892 - DNA, 396 bp, Arabidopsis thaliana
cctatctactgcttcttcttcgttttcgtcttctttatcaaggaatgctgtttaattggaatcaacaatggagaatttgacggaaatagaatcaacgatggagagtttaacggaaatggagagtgagagagttgaacagggtaccgataaggaaattggaagtggagagaaaaggcaggatgatgtaaaggaaacggagaatgagaattctggagagagagtaggagaggaagctcctgtcagggaacatgaagattctccatgtctcattgttattgaagaaggtacttccctagcttcccttgaggaggtgaccaatgctgatgatctgccgaagattgatgatgagaagaattcccaatttgaaacaagcccgcatccaagtccttctccttc

SEQ ID NO: 893 - DNA, 396 bp, Arabidopsis thaliana
aaatccctaattcttgctccctcccttcaatcaattccgatcatcatcgaggtctctctactccccgaatttaaagatcagagccgcgacttcctctgccttcttttcctcggaatttttcagctacgttttccaggtggtgtgtattgtcaatcagttgacctttgcttttgtagccagatcgttcgtgctttgagtttagggctcttttacaaggtttcgtgttggtggaatttctctacctaggtttgggggaagagttcagtaatttcgttgtagatcgtgatttgggcttttagggtttcggtttactggttgctggaatttatggtagcgttattgaattcggactctctgcatgtgtaagcgttgaagtttgaagtttcaccgggtttt

SEQ ID NO: 894 - DNA, 396 bp, Arabidopsis thaliana
ctcttcattacgctagtgacgattctcactgtggttcatgtacctatattgacaccgagttcagagagagagacagaatggaatttgaagtagagtcaagtggggattttcagacccctaagagcggtttgtttgacagattttccagtgagaggagtgttgtgtctaaccctttcagaaatggtggcatgtctatatctgtgcatagcaatgaacagtggattggggatgatgatctttcacattcagacgctgcactcggtaatgagacatattcaaatagtctgggtcaattgcaagctagggaagtgaacattcccaacttcccggtttctgacacccagtatcagcttatgtctttggatgagcgacttcttctggaactacagagcattg

SEQ ID NO: 895 - DNA, 395 bp, Arabidopsis thaliana
tttttttttttttttttttttttttttttttttttattccaatttgttagtttttattcaatccatttgtttccttttccatttcggaaagctcaatgattttcagtaacaatgaaaccaaaaaaaaaaaaatggaaaacagagcaagcaagaaacagagtatataagggggattcaactgaattaagcttcccaaccacgcaactgggtggctcgagcgactcggttaactccaagagtgaaagctcccatacggaggttgcaagaatgagtatggcacattgtcttgatgttgtgaaaggctcgagtcatgtatttttgcagctccaagttcactttttcctcttcccacatgaatccttgaatgttctgcacccactcgaagtaactcactg

SEQ ID NO: 896 - DNA, 395 bp, Arabidopsis thaliana
ttttttttttttttttaaccaattggagtatttgatttagatttacagtttcattttatgctacaaataaaaaagggtaatggaagaactaaatgaatccaacatgacatttttacagcgacattcacaaagaaagctcttctagattgctgtcctcttgagaacaattctggagagctcttgagagactagcttcatatccggtctctctggtgctggtgagatacagctcagagcaacctgcaagacatcagtaagaaccccaaagggattccttgagccctgtgatccaacaatcgatggatcaaaacactcagttgcacggttttgtcccacaagcagtagaacccattcagtgagttcaacgacacctggatcactgcacactatatctc

SEQ ID NO: 897 - DNA, 395 bp, Arabidopsis thaliana
  misc_feature (1)...(395): n = A,T,C or G
tttttttttttttttttttttttagaggcaggacaaacaatgtggatgttataaaacgatacgtaacatatcgggtgatggacaaaaaacatagaggtaggacaaacaatgtggatgttatatannncgatactgcatggtatcgggaagatcatcttatacaaattacagaccctaaatctctgctccgagtctgagccacaccgaccagaaccgagcaaaacagtggacatgacatgccggtatcacttggaccaagcaacagcatcgatctcggattgggctgctcgatacaattctagcngctttgagatggcactgcgtctctccatgattgctggatcttcgttcaatagcgacgagagcctcttcatatccatggtaccgagctccgc

SEQ ID NO: 898 - DNA, 395 bp, Arabidopsis thaliana
cttttttttttttttttttcgagaaagtatgaatgtagcgagagtgacataagacttggatgggacaaggagtcgggagaaaagttaaaagttttgaactttcgatcccaagtatcataatggttctaagtgtgagaactttcgtgcgtttcatgcaactcagtaatcgaatccaagaattgagcattccatttccaccttgatatgggacatgcatgatcacgcagctctctagatgtccacgatgattgtttataacctgagtaatcaatgtagcaactggattcgaaccatcaggcgtgttgttggaattgataatcttcttccgcatgtccaagacgagatgagacatttgactccacacatgttcccatcgcttcgacacaacactcgtc

SEQ ID NO: 899 - DNA, 395 bp, Arabidopsis thaliana
tcgagcggccgcccgggcaggtaccacgatctgtgtatacatctgggaagtcctcttctgcagctgggttgactgcaactgtggcaaaagaaccggaaactggtgaattctgcattgaggctggtgctttaatgcttgctgacaatggaatatgttgcattgacgagtttgacaagatggatatcaaagatcaggttgctattcatgaagcaatggagcagcagacgataagcattacaaaagctggtatacaagcaaccttgaatgctaggacatcaattcttgcagcagctaatcctgttggtgggcgatatgataaatctaaaccacttaagtataacgttaatcttccacctgccattctttcgaggtttgatcttgtgtacctcggccgc

SEQ ID NO: 900 - DNA, 395 bp, Arabidopsis thaliana
  misc_feature (1)...(395): n = A,T,C or G
ccggtggtgacctaatcgattggctctgcaagttggtgcaacctccttatattgattcaatcgaatggtcaaaatggcangtcttttgggtcgatgagagggtttgtgcatgggaagatccagacagtaactacaaactcgccatggagggttttctctctaaggttccgattccggataagaacatctacgcaatcgacaagcacttggcggctgatggtaacgccgagcactgcgcgacgctctacgaggagtgtctaaagaatctggtgaaagaaaagattatcccaatatcgaaaaagacagggtatcctgagtttgatctacaacttctagggatgggtcctgatggccacatggcgtctctcttcccaaaccatccacagataaatgag

SEQ ID NO: 901 - DNA, 395 bp, Arabidopsis thaliana
tagcggccgcccgggcaggtacaagattcctcaaaaggaaagaagagaaagaagataagagatatctggttggtcggagatggagatgatcggaggagacgatacagatacagagatgtacggagctctagtgacggcacagtccttaaggttgcgtcatcttcaccactgcagagagaaccagtgtacctctgttctcgtcaaatacattcaagctcctgttcatcttgtttggtcactggtgcggagatttgatcagccgcagaaatacaaaccatttataagcagatgcactgtaaatggtgatcctgagatcggttgtctcagagaagtaaatgtcaaatctggtcttccagcaaccaccagtacctcggccgcgaccggcgcgccggatc

SEQ ID NO: 902 - DNA, 395 bp, Arabidopsis thaliana
aacggatacttcaaacaagataaaaaagggtacaaaaggagatgtcacagcactaaagcccactataatgacagctgttccagccattcttgatcgtgtcagggatggtgtccgcaaaaaggttgatgcaaagggcggattgtcaaagaaattgtttgactttgcatatgctcggcgattatctgcaatcaatggaagttggtttggagcctggggattggaaaagcttttgtgggatgtgcttgtgttcaggaaaatccgtgcagttttgggaggtcaaatccgctatttgctctctggtggtgcccctctttctggtgacactcagagattcattaacatctgcgttggggctccaatcggtcagggatatgggctcacagagacttgtgctg

SEQ ID NO: 903 - DNA, 395 bp, Arabidopsis thaliana
caatctcgatgaagcggtgatgacagggaacacaccaaacgaagtgccaacactagaatcagcatcaatggagataagggtacttcctttaccaaacatgatagacaaacaaatgtcatcactgttagaggaaagaccatcacagaagaagaaaggaaaagacgccacggaatcattgtcgagctgcttcgtgggtttatactcgatcaaatcagtgaacaaggcacgatgggatgttattataggtgtagtggctctgatagcaatgttgttttatctagaataagaggcttatggaagtagcgaaaaacagtgtcctagctatgtttgtatcatcttttctcggacattgacaaggattatatgatgtttttgtgtaaaaaaaaaaaaaaaaa

SEQ ID NO: 904 - DNA, 395 bp, Arabidopsis thaliana
  misc_feature (1)...(395): n = A,T,C or G
atccaccaacgatggcatcgtttgcaatgaaatcacagagcgtgttgggccagttccaatgccgntgcggcggttgtcgctttatgtgctgcctcacgacatgtagaagaaacgtttccgtggttggaaatgatgtgaggaggaggaccaagacagtcgtggctgtgagtcaacacgatgtttgttgttgcatcacatcgttcaaagactccgagaaccgtcaagtgaccctgtgttgttccttagtacttttgcttccattctgttaataatgatctttaaatgcaatagaaacaatttcatatgtatatttcaagtctaaacgttcttccgtgaaaccttgtgtttctatgcgagaacttaacattgtcgatattgttatgttatttcatagt

SEQ ID NO: 905 - DNA, 395 bp, Arabidopsis thaliana
  misc_feature (1)...(395): n = A,T,C or G
tttggcaatctcacctgcaaaccaagatcttgctacctcagatgcaattaaaatttcccgtgaggttgatccatcgggggacagaacatttggtgtcttgacaaagattgatcttatggacaaggggacggatgcagtggaaattctggaagggagatcttttaaacttaaatatccgtgggttggtgtcgtcaaccgttcccaagcagatattaacaagaatgtcgacatgattgcggctcggaaaagagagagggagtacttttccaatactactgagtataggcaccttgctaataaaatgggttccgagcatnnngcaaagatgctctccaagcatctagaacgtgtgatcaagtcgagaattcctggcattcagtcacttattaacaaaa

SEQ ID NO: 906 - DNA, 395 bp, Arabidopsis thaliana
gaaagaggatcacaccaatctagatgatgcgtgtgctcttcatttcgctgttgcatattgcaatgtgaagaccgcaacagatcttttaaaacttgatcttgccgatgtcaaccataggaatccgaggggatatacggtgcttcatgttgctgcgatgcggaaggagccacaattgatactatctctattggaaaaaggtgcaagtgcatcagaagcaactttggaaggtagaaccgcactcatgatcgcaaaacaagccactatggcggttgaatgtaataatatcccggagcaatgcaagcattctctcaaaggccgactatgtgtagaaatactagagcaagaagacaaacgagaaccaattcctagagatgttcctccctcttttgcagtgg

SEQ ID NO: 907 - DNA, 395 bp, Arabidopsis thaliana
atttgtaacatttagggtaaagaaagatttaaatgtcaacttattaaatatgtatattggaaaaaacccaaactatagtctaatagtggtagggaaaatccaggcatagcttatatggtacatcccaaagaccaaaccagatttccaacttccatgtcaaagaaaccaacaaggagaaacaaaggaaactgtttaacttgatgatattagttcttcgagtattcggacgaatgaatcggagaatacccttctggcagttgctgctgcgactgtgctggttgcgatggttgctcagcttcaaccttctcttttgttttctgtccaacctctccagctgcttgagccactctattgaatgctcctgcggcccagctcacaccagttaacacgtaacg

SEQ ID NO: 908 - DNA, 395 bp, Arabidopsis thaliana
tttgatagaacatgtttagaaggtaacgggtgtgtaaaccacacattcagcaattgtacatagaaagaaagactaaaatagaacgagagagataaaatgagtctctatccccctcaagtaaaaatcagtcatctcacccacaagcatccaaaagataataacgtagggcagatgcagagacaaaacacacaaatttgctctcaagagtttcatctttcttcattctctcgaaacttttcacctgaagtagatagagacgagaggaatatcgacgtcattgtcatcttcatcctcacaagccaccactacatcaagatggttgcgataaggcggtaactcgactttcgcaacatcccgagcgagatccacaaccttcttgtccatcctctccttgt

SEQ ID NO: 909 - DNA, 395 bp, Arabidopsis thaliana
ctttttttttttttttttttttttttagtaaattgccaagtacaagtatcgtccaaatattggtttgcaagaattagtgtcagtaccagcaatagcaacattgcagattgtcgaacatgcatacatatatgtataatatatatagcctatacaaaacaaatttcaagaagtacaatctaagaagaaacatatagtatgagaatatagaaatcacaaaaacaaaaacaaaaaaaaggtagcacaacgaactgaatgaagatattctcagagatcttgggaagcacagagcgcagtcgataacgccgggaagaaatgttccagacttatttaccgcagttgaatcccccacaaattgagaggatgatgatgagaatcaaggcaatgataattgcaag

SEQ ID NO: 910 - DNA, 395 bp, Arabidopsis thaliana
  misc_feature (1)...(395): n = A,T,C or G
tttttttttttttttttttttttttatcatcattaagcgtagttataaataaaaatttattttattttcctgaatagcttaagagaaatttgatcttcgtcttcgtcactacgtccccagctctcgagctttgttcactcgatttcctctatacatttccttaaaacccaaaattcttaagcctaatccaaaggagaaaaaaacagagcatttttcttcttctccaatttaaacagtttcctaataatctcactttgtctactcgattctcccaactccaatttgactcatcggaatcatgccattatcaatgaatcctccgacnaatccnncaccattgttccgttgcatctccgtcatgtaactcctcacttccgccttaatcatctcttgca

SEQ ID NO: 911 - DNA, 395 bp, Arabidopsis thaliana
tatagtgtaggaaaaagaatgtcaaatagaaggaagaagaacgtaatgttactctcttttacatacaatgatgatatactataaaggcaatggagacagcatcgcattagtttgcgagtatcgggttcctttcttcatcgatatctatcgcaaggacacggtctgggtctgagccgcttggcccttccgcgtaaagagttggaagataggccttatacgccggcaaataccgcgacacaaagtcattcacctcctcatccgacatcccagcttggccatcctgcctcatggcgatttccgcctgaagacgccaccggtatacataacttgggtcctggattttgatgacgacccaagcatcgatgtacttgtcccatgcgtcgtaatacgcttca

SEQ ID NO: 912 - DNA, 395 bp, Arabidopsis thaliana
ttttaacggaaaggaaagatttcataactgtttgcttaaaagagctgtaagttcaacaattaacaccatgtacttggtaagcaaataaaagagcgataggaaacaagaatccagaatactaatacatcatcgtaaaaatctaaacttgaattaggtaaataaaagcttaagcacgttctccacgaattcttctagccaattgaatgtccttaggcatgatcgtaaccctcttggcgtgaatagcgcagagattagtatcctcgaaaagtccaactaggtatgcctcagccgcctcttgaagagctaacaccgcgtgactctgaaacctcagatccgtcttgaagtcctgagctatttcccgaacgagacgctggaagggaagcttgcggatcaac

SEQ ID NO: 913 - DNA, 395 bp, Arabidopsis thaliana
cttttttttttttttttttttttttttttccaaccacaacgagatgaattacaccacgactctaagtgaaatcatcttttaaaccaccaaaattcacccaatgacacgaaaacatttctagcacaaagaaaatcaaatcctatcctgagatccaatccaattccaagctattagtccctcatgatccgagtgtagaacatgtcctaatagcatctacgccaaaagcgcaacttcagaagggttttgactcctctgctttcactatttcggtcctaagcctaaaacggacatactaatccgactgatactcaaccggatcaaccgggctgagacaaaaatttcttgaagtcgaggctttattggagagctttccttcttcttctacaatccaaatg

SEQ ID NO: 914 - DNA, 395 bp, Arabidopsis thaliana
  misc_feature (1)...(395): n = A,T,C or G
ttttattagaatttagaaataaataaaaatatatgaaaaagaagcaatgcaaaaaaaacacgcttgttaagaacaaacaaacaaacgaaaggacaaaaaaagaaaaataaatctcacagaatatatttgtttgtgtatgtttgcctaggaatgatgactggtgcttccatcttcttgatggttgtgatgatgatctccgtcacggttttgctggttgttgttatggttccccgtctccgccaccggtcggtaagcagcattcaacgccgctaaaactccataatggctatgttctccacnnnnncctcctcctcctccataaccagaagccaaaggctgtccagaaaacaaagcaataggagctgcaaaattcatcaaatgaactccactaccgc

SEQ ID NO: 915 - DNA, 395 bp, Arabidopsis thaliana
tttaacttgtaaatcatatcaatatcaccattaaacaccaccaccaattttaaatatgggtaggcttcagatatctgactataataatatagagcatatgagcgtatattaataatacaaggcaaaaacaaaacatataagccaaaaggatttacggaccgaagacttttttccccaggctacttaggtacccgtttctttgcataaccatttacctgtttgctgcgttaagcgagccagaaaggcgtgtatctttcaagcacccggaagtcaccagatgtttgtttggagccgtgaacagcatggaaccaagccggtgaatttgcaaaagagtttataaacccgttgcatccaagttttgtctttctcaccctcagccattgtaaggatgtttt

SEQ ID NO: 916 - DNA, 395 bp, Arabidopsis thaliana
tcgagcggccgcccgggcaggtatttggtgaagtcacgagaatcaacgatgacggcgacgaacaagcaagtcatattgaaagactacgtgagtggtttccctacggaatccgatttcgatttcactaccaccaccgtcgaacttagggttccggaaggtactaactctgttctagtgaagaatctctacttgtcatgcgatccttacatgagaattcgcatggggaaacctgatccttccactgctgctcttgctcaagcttacactcccggccagccaatccaagggtatggagtgtctagaataatagaatctggacatccagattacaagaaaggagacttactctggggtatagttgcatgggaggagtacctcggccgcgaccggcgcgc

SEQ ID NO: 917 - DNA, 395 bp, Arabidopsis thaliana
acaagtgcgaatttcgaacggagctacgattccatggcgaccaacggagagaaggtcacggctacggtggtgaatggcggagggctatctactggtgaaaaccctaagaaaattgtagacctcaacactacggagttagatcgtactgacgacattctcgacggagaagtcaagggattttcagattctggtgaaaagaaggaagaaaccgactctaatggtattggatcgacggctggtgttgattctggggatatctctccggtcgatgatatccagaagaagattcgacgtgctgagaggtttggtgtttcggtgaaattgaccgaagaggagaagcgcaattctcgtgctgagaggtttggtactgtagctgcagcagtggtgaatggctc

SEQ ID NO: 918 - DNA, 395 bp, Arabidopsis thaliana
ctttttttttttttttttttaggcagaattaaaatttattagatatgaatatcatgaagaacaaaagcaaagatgaaatgaaataaaacttggtagcttatataagaatctcattacaatttcaagtaatacgaaggtgaatgtgaagcttagtactcagtttttggagaaggtgagtatgatggtggtggtggagaactgtagacatatggtggtggaggagatttgtagtcaaccttaggggaaggtgagtagtatggtggtggaggagatttgtagtcaaccttaggggaaggtgagtagtatggtggtggtggtgaactatagacgtatggtggtggtggagatttgtaatctaccttaggggcaggtgagtagtatggtcggacgcgtgg

SEQ ID NO: 919 - DNA, 395 bp, Arabidopsis thaliana
taaaattcagagttttcatttcacaagcattttccatcgaagacaaacagtaacaaaaagtaaaaaagggtaaaacacaatcaccgtaaaaaaagcaattactggcaaagttgttcgacggcagtgacgatctgagctggctgaacaaccgtccattcttccaatgtaccggcgtaaggagttgggacatcctgagaagacaaacacatcaccggagcatctaagtaatcatgaaagttctcgtttattgcagccgtcaaactggctccgattcctcccgttctcatacattcctccacaatcaaaacccggtgtgtcttcttcaccgagtttccaattgtgtagagatcaaacggcttcaacgaccttatgtcgataacctctggatcataccc

SEQ ID NO: 920 - DNA, 395 bp, Arabidopsis thaliana
agcggccgcccttttttttttttttttcgggggtttaacatcagataaagctacattacatataatcttgtaaagctgaatgatacatattctagtaaaaataattaacgttacataaaattacactcgtagatttcacaacaacacatcttctattgagaagattctttttcaatgtctggtatagggaagttttactagcttgttccatactcaagtaattcccacctgaatggctgaaagacatatagcacttccgggcaactcttgaacaaaagagcgacacaaacgcaaaccgctgctatcgctaccatcgaaagcattgctggcctgtaggcaacagacttgtggtgcgttgtgacaaacacacgtttgtgatcacagagcttacattg

SEQ ID NO: 921 - DNA, 395 bp, Arabidopsis thaliana
ttttttttttagagcaaagatgatttgactaaaataactaaaatcacataacaattaacgaaaacaacttagagaagaaaaacacatatataaaaccagaatccatgaagagaaagatccacaacataacataccaaagcattaatatatataaatgcctaagtcaagtaaggtgatgcaacggcataaagagggaactcgcggtgaaccgaaaaaccgctggattcagcgacatcagttttgtcttctttagattcctccggtagtttccaatcaaacccatgcactaagttagccaaaaccacctcattcaataccacagcgaatgatactgctggacaaatccttctccctgctccaaatggaagcagctcaaagttttgacctcggaaatc

SEQ ID NO: 922 - DNA, 395 bp, Arabidopsis thaliana
  misc_feature (1)...(395): n = A,T,C or G
acatttcgtagtaattattatgtttttggtgtcagcagagtttgattttataacgaaattgggcaacccctacatatactgtatctttcttatgacttatgagatcaaattacagaagaaaacgtcaattgctcacacattgttttatgtttgctgccttttgttttcatgcaacgcaaaagaagatgtgatcacatctgagcaaccagttcctctcctccctgagcagcaacagtcacagtagcatcttcgataagtgaattctccatccatcgcttcagcattttcaatgcagctttaggctggtccattggaacnatgtgtcctgcatctctcannttgaggaaactgagttgttcataagtctttaacaagcctgcttctttgccatccac

SEQ ID NO: 923 - DNA, 395 bp, Arabidopsis thaliana
  misc_feature (1)...(395): n = A,T,C or G
tttttttttttttttttttttttttttttttttttaatagaaaatttcttttgaagtctataaccaaaaaaaatgataaattaaaagaagaaaaaagataagaaaaaaaaaaaaaaaaaagagttctaaacgttacaaaaagtttgagcaaacatcatctcgcttctttaactcatttaaagagaaacgatggattctctcttcctcctcatgatgtctttttggaccataaagttttcaccggtgtgaaacttacccgcgacccggtttcctgactggaacattgtcctcatcatcagattggatatctccgtactcccagattccggtcctngatttgcgagcttcgtcttggaacttctcaagagcatcaagagcggcttgcttgtcttttg

SEQ ID NO: 924 - DNA, 395 bp, Arabidopsis thaliana
  misc_feature (1)...(395): n = A,T,C or G
tctagagcggccgccctttttttttttttctctaaaatattacttgtattatacctcccaaccaataaatgtatataatatagacaaacaatgaaacaaacaccaccaacaacaaaaaagtaccacttttagagttcttttagactaaacatagatcacaacactggtacggagattgagattgatatcggaactgagacatccgttgtaaaaccaccgtctctattcccatttgtattccctacaaacccgtaaacgccagaccgcatcgctgcattttcccgcctctgaaaaacccgagcaagcgannngctttccgtctagcccgctttgtccccgtaaacaaaagcgtctgtagcaaccccgcaatcgcaggtgctctcaacactttctcc

SEQ ID NO: 925 - DNA, 395 bp, Arabidopsis thaliana
ggccgcgcggccgcggataatacattgaacattcattcttatgagcaagaatttggactttcgtatatacaaattaatgtacataatctattgttgcatttgtagtaactctcaggaacaagcaatacttggatctcctggatgatttaaacaagaccaagcttgttgtgttacggagcatcacaaaatggtctattaccactagagcttaagagacctctataaaccagttattttctgtctcagagagaggaagaatgtctaaacagtatgtgccatggcttgtgtcatccgctttaactccagcgtccatgaatgtttttacgttgttgggaaaattctgtgttgcggatgatgtgtgagctgctacgtaacttagcatataacagcaaaag

SEQ ID NO: 926 - DNA, 395 bp, Arabidopsis thaliana
cctctagagcggccgccctttttttttttttttttttttagagaggaatcaatgatttgattaaacaaagccaagacgaaccggactaaaccggagatagaaaaaatactttataaaccagaaatcaatagaaacacaccaagggaagaagaagggaaagcaagcaagcaccagaagattctaagtatactactaacaagctttaaactgaacacaaaccccaaaccgaagagaataaaaacagagtattctacatagtcttgcatagttacgtttcatcagccaaaacttgaaaagaagagaagccagtgaaaacaaaagtttgaatctctgaacaaggagcaaccgaaataaacagtttacctttagtttaagaagagcaacatgctcgtttc

SEQ ID NO: 927 - DNA, 395 bp, Arabidopsis thaliana
ggatcctctagagcggccgccctttttttttttttttttggcctaagaacttttatcaacttaagagatttggacatttgttcaaaatgatgatgcaatacacaacaaacagatgatatacacacacaaatatatatatcttctctcacagttttcaaagaatggcccacccatctttctccgttttgaaatctactcatcagccacgggcgggtcgacccaacgaccatgttctttgatcagaccgatcagagcatctgttgcctccgtcatagctatcccacgcttcaccaccgtctttccgacataaaggtcgatttttccgggagaaccacctacatatccgaaatcagcatctgccatttctcctggtccattcacaatgcatcccatga

SEQ ID NO: 928 - DNA, 395 bp, Arabidopsis thaliana
ggatcctctagagcggccgcccttttttttttttttttttattgaatgtaattatagatattattcataatcagtttgtcacatacaatctcttgcacagatatatacctttaagtaaacacaaaaaagcagaacaaaatccttttttaaaaccttcatagcttcaatcgaaccgacagttttgactttaggcataaccatgtagttttttaagatcagtcgctggtgaatgccattctttgtttctgagcttccgatgggagcttgacatcagttgctaaaccgatggcttgaaggaacttaacgacgtaccaagtcatatcaagttgccaccattctaagccgtgtcgagctgagaactcaaaagcatggtgattgttgtgccatccttcccc

SEQ ID NO: 929 - DNA, 395 bp, Arabidopsis thaliana
gattcgattacgacgacaaggaaatagaaagcgaagagggcttatcaacgctttatgatagatggaggagccaccactccgttcctaggagtctaaatgaaagggagaagagattcaacgttttcagacacaatgtcatgcatgtccacaataccaacaagaagaaccgatcctacaaacttaagctcaacaagtttgcagatttaacaattaatgagttcaagaatgcatacaccggttccaacatcaagcatcacagaatgttgcaaggaccaaaacgcggctcaaaacagttcatgtatgatcatgagaatttatccaaattaccgtcctccgttgattggagaaagaaaggtgctgtcactgaaatcaagaatcaaggaaaatgtggaagt

SEQ ID NO: 930 - DNA, 394 bp, Arabidopsis thaliana
tttttttttttatctaagaactagaacagtttcaccttcatatttcacatagggccaaaaggccataaacatagagagagagaggttctacctctttagttctacatacttatatatagataactttagggtaagctaaaaactaaaaagtcttttatatataaggcgttatatgcgttatattcgcttgcttatctaaaggtcaatgcttttaatgagcttcatgttggcgagtctctcgagaaagacattgaaaacgtcttcacgactaagcatgctgactcggacatgcttcttgtcagatccacaacgctctccagctctgctcattaccttgtgtctcctcaattcacttaccagatccgtctcttccttcgtccctagccacgcaaac

SEQ ID NO: 931 - DNA, 394 bp, Arabidopsis thaliana
ttttttaactgtttaaatgttttaccgaacttttttccaccccgccaaaaagacggttcggagacatcattatatttacatctttaccctcaccaattatcttaattacgaatctacccctcaccgggaaaaaaaaaagaacaagaaaaaacaactcaaacgaccaccgtcctgatactactcggaagataccctccggagattcgatcattcagatcatcttcaagctcgatcctaatcacagaatcttccgaagacgaaactcgagatttcacgctattcaagctcgaacccattgcttcctcaagccattcctctaagctaatcttacttagccagatcgcacctgcaattctctccaaagcatcatcttcaatctccaccgttagtccat

SEQ ID NO: 932 - DNA, 394 bp, Arabidopsis thaliana
ttttttttttttttttttgaatgaataaaagtcttataattatgatgtgtgtacaactacaaagttttccttggagtatagtttgaggatttatccagaagtagcagaagaagcagctacagactcggagagttcttccatgagttccttttgctccaaagcagcacaagcctgcactgcgtcctctaaagcaccgtcaagaaatgttgtaagcgcaaagttcatctttagcctatgatcagtcactctactgtccttataattgtatgttcttatcttttctgaacgagctccagtcccaacctgagatttcctttcattccttatcttctcttgttgttcccttacttttatttcatacagttttgctcgcagaagctggaaagcacgcgcc

SEQ ID NO: 933 - DNA, 394 bp, Arabidopsis thaliana
  misc_feature (1)...(394): n = A,T,C or G
actgattcctcagtactatacgagatgaaggaatgcatcttaaagggacaatcatgcacagtgcaaatactaaattacagtaacagaaaagataagagctcattttggaatcttcttcacatctcaccagttcgtaatgcttcaggcaagacagcatattttgtgggtgttcaagtnnnagcaagttgtagaaatactgaaattaaagagctgagaccagagacgagacaactgagtgttgtcggtgcggttagagttgcggttagaagctcattgatggtgacatgctaatatacgccagaaagaaaatgcgtcgacttnnagaagagtctaaagtgaattggacatacatctttactatatgtataatcatttgacatactacattaatata

SEQ ID NO: 934 - DNA, 394 bp, Arabidopsis thaliana
cttcaacgctgactcttcctttactcttgctcatcaaaagtatccttatgctttggaaggaatggatacatactccactgttctttatcacctgaaagaagagatgaggttgggctatctggctcaggaactgatttcagttgatcgcctgtctccagaatcctggtgtgcagttgggaactgttacagtttgcgtaaggatcatgatactgctctcaaaatgtttcagagagctatccaactgaatgaaagattcacatatgcacataccctttgtggccacgagtttgccgcattggaagaattcgaggatgcagagagatgctaccggaaggctctgggcatagatacgagacactataatgcatggtacggtcttggaatgacctatctt

SEQ ID NO: 935 - DNA, 394 bp, Arabidopsis thaliana
tgatcagtttctctccattggtgatcgctcgtcagaaaaattgagctcgattttgtataaattgaagaaaaagaagaagatcatcaaatgcgtgatttttacttttccgttcaagtgattgatcaagggaacataagcagctagagaccacaccactcagttatttctatctcatagtgcttgtggatgttcaagctataagaatgtgctcggtggttctatgaatatataggaagattggtgttttgatgggatgggacaccaaattgctaaggtttatggtgttatcaattactagtacgtgttatcttccgaacaaccaccaccatggaatctcatctgggaaatggagtaggcagttcgagatctgccaaaaatacaaagaacacttcta

SEQ ID NO: 936 - DNA, 394 bp, Arabidopsis thaliana
  misc_feature (1)...(394): n = A,T,C or G
gaatagctgccaggttgtttgaaacgaaaggacgcacaacttggattgataaactatggtgcgagtggttaggagacgagggtccttcagatgaggagaaggctacgatcccggagcatgactttgccattgtcacattctcctacttctacaatttgggtaggctgggtttgcttgatgatccgggccgtcttctcacatctagtcagtcagaatcagggaatggtgaggacagtggcaggaagagaaagaagtctttctcggatccagannacaccagtgaatctctgtgtaatcagtatgactcttctgaggaggtttcttcaggtcataattcaaactcgtcaagagatctaatagctgattatgatgatagtctcatgagcaaaagagt

SEQ ID NO: 937 - DNA, 394 bp, Arabidopsis thaliana
  misc_feature (1)...(394): n = A,T,C or G
ttcgatacaatacatagccaaaataaaggccttttaagagattacagaaagttgaggccctacctagagcctaccatagtaacaatgccgactgaagaagaaatatcaacttttgacccaatctgaaaccacgtgtcatcaagaggatataacctcaacacgtattagacaagtaatcggaagatttccgataacaacttttgccgttgagcaccgatcacggtgagagaatcagcgtcgataacaatcgaattgtgattcttttggtaatcatcgaagttaaaccatcgaagctccaatataatttaacagcataannatatccgaataagcgtcggaaaattcttcgtttcttcaaccaaggacgccatctcttaataattcttgtaactct

SEQ ID NO: 938 - DNA, 394 bp, Arabidopsis thaliana
ctcactacactagagacaattttgatagcccttttcttcacaccaagcctaacccttgaatggtatggattgttactgcataatctctcaaacccatgaaactgagggatgaaaaaatcgagcttgttgggtgttttcaacagagtatccatcgaattcccccaaaatcgaagaaaacaccaaaaggatataattcaaaaatcaccggacacgatttctaaccagagggattgagaaaatggaatactaaattgctagagaaaagatgaacgaagaccacaaaacttacccagaagcagtagcttcatggagatggagacaattatcttcttcccagaaagagagagaaagagagaattgagacctgcccgggcggccgctcgacgcgccagaa

SEQ ID NO: 939 - DNA, 394 bp, Arabidopsis thaliana
ccacgcgtccgggagagctgaaaagatatgcaattcactatgacaaaaatgggcgtccaagtggatcggctgaagttgtgtatatgagaagaagtgatgcaattcaagctatgaacatctcttaaagcaagacttcgcatcttgtcatgtacttttgtgttctttattcgtagtctctgactaaatatgtgccaaagtctggtttggtttaattacgtttaggatggctctactctgctttcgttttcctcttttcttgtttcacactttcacagtcacttttggttattgaagttaaaagagatttagctgtaaatgagaaagctgttcttgttagttggttgaatctaatcatatacgaatttatcttaaaaaaaaaaaaaaaaaaaaaaaa

SEQ ID NO: 940 - DNA, 394 bp, Arabidopsis thaliana
gcggccgcaaaactttcaagcttaaaatggagaggacaactaaaattacaaaaggaaaaaacaaaaacccactaaaaaagaagacgaaatagttagaaagtcccacaactacgaaaaaaataactgtattatttgattgcctataagactcatgaattttatatataatacatacagtttcactacttgtgccttcaactctccatagatgtgtaaactcctgcaaccaagaagatgaacatagcagtgagagctggctcaggcttctatattcaagtcctttagtatcgtgtcatgtgttgtaatatgtgaggaccggatgtctgcgaaaccaattgttctgaactttgggagggtcttaagagatgattcggaccatttgggttcaccatcg

SEQ ID NO: 941 - DNA, 394 bp, Arabidopsis thaliana
  misc_feature (1)...(394): n = A,T,C or G
tttttttttttgatataaattgttctttccatctgcggtctcagagacataactttgaactagtaaaacgaataacccccaaagacatgattctgagagactacaaagttattaattgatgcaagacttaatttcaaagatcactttgggctccacgactggagtaaagtagttaatgcggtatgagacgaaccagtttctgtcaaggctaattcggctgcgttcttcatagccatnnttctctccctaaccggacactccccaattatctcttggactcgtttctccacctctgtagagctcacgaaacccgtctctgattcattcatcgaaatcgcaatcttgatctcatccacaatcatcactctattaaacctctgctcagcgtacaacg

SEQ ID NO: 942 - DNA, 394 bp, Arabidopsis thaliana
tttttttaatatcataaagaatatatgttttcattaattctttttaactttcttcattattgtacaaaaattttatattagacctacatccatttatcaaataatatacttttcaacatgacatccatctaaattcaagctaagatcatctttcgaatttttcgatcagatcattgccgttaagcaaatataaaacaaatcaggagcaaaccttattgttcttccttaggtatgcatgtgcacctcttctgttcttctgttaactcctggatctgcctttgaagaactttcacgtattctactgcttcttctaacatgtctgcagtgttggtttgcttgtccatgttaggtacaagctcttgtagcttccttatccgatcactaatccgcgtcc

SEQ ID NO: 943 - DNA, 394 bp, Arabidopsis thaliana
ctttttttttttttttttttttttttttgaataatggatcttcttcttctctctccagtcaaaaagaactttgcacaaatgaatttatcaaatcaatagttacaacaacgaagaaaatgtacaattttccattctttgcattacatatgttgcagtcttggttgtttcattgggggtgaactatctttgtcctttaacggtttagggctatctccatcttttgttttgttccagagagagctgatgaattgggctgcgccgcttctagagagagtacactcttgtaaaattcatacgaagtaaagaatatggctccttgcgacatgtacatcactagtctggggatcaagcctctgtatagtcctctcagaccttcttgcctgcgtattgattg

SEQ ID NO: 944 - DNA, 394 bp, Arabidopsis thaliana
caagtgacgtttgcaaagagaaggaatggtcttttgaagaaagcatacgagctttcagttctatgtgatgcagaagttgctctcatcatcttctcaaatagaggaaagctgtacgagttttgcagtagttcgagcatgcttcggacactggagaggtaccaaaagtgtaactatggagcaccagaacccaatgtgccttcaagagaggccttagcagttgtacccaattctcttctctttcttctaattaccttaattaattactctcaatttttactttgatttttagagtcaaatgattaatgttataatttgtcatatacttcaggaacttagtagccagcaggagtatctcaagcttaaggagcgttatgacgccttacagagaacccaa

SEQ ID NO: 945 - DNA, 394 bp, Arabidopsis thaliana
  misc_feature (1)...(394): n = A,T,C or G
cactctccttttcaaccgaaaaaatacacgggtaatcgtaaaacctataacttaaaaacatttatctacnngaacaaatgtcctaaaagcctaacatttttctctgctgaattttccgactaagttcctccgccgacgggatgccgtcgtagccgcttgttctggcacttttccccgcgctctgccaccaggcctttaactcctcctcaagaaagtcttggtttgagataaactgagactcaacaaggcaagtcacacctttaaccttaactgaaattaagcttttctctgaatgtctccttgagctttgtccctctnnntccccatctatgcgagctacataataccctgttcctccaagcccttcttcccatttcccgagccttaaccgcaa

SEQ ID NO: 946 - DNA, 393 bp, Arabidopsis thaliana
aaagtcaggattttctcaaagtctaaaacaaagttaccacaaccatttcaccataataatagctaaaaagttctacattccaaccaaactagagctaaagaattccttttaaaagaaaagtttaaaagaacaattaagactctgaaaactttttaatcctccaccttctttgcttagagctcgtcatgggcggcatcggtttcctcggcttccttggtttcctcggcctccttggtttcctcagactttgattcattgtctgagtcatctccttcattgtcatcatcttctgcttcttcctcagcgtcggattcagcaggagcatcctttgactcctcttcctctctcttcttctcagcttcgtcaaatgctgctttctccgcatccttgtgc

SEQ ID NO: 947 - DNA, 393 bp, Arabidopsis thaliana
ttttttttttttttttttttaaagaactctttttttagtataacatatctaaaaaacttatcttcaaaatacagaaattcagaagcgaaaattacagttttgttcagctatactttgctacagaaatgtcaaaggctttttgatcagtagacttcaacgttccattgctctgccttcttcaactgcttcttgtaatcaaaccagtcaataccgtcatttgcagccaatgagaccataatgtcatcaattcctttctccattcccttgagtccacacatgtaaacaaaagtgttgtctttcttcaacaactcccataactcagctgcgtattgcgccatccgagtctggatatacattttctctcctttatcgttcgcttgttctctgcttatc

SEQ ID NO: 948 - DNA, 393 bp, Arabidopsis thaliana
tttttttttttttttagaatctgcaagatttttcatctttatttcaacaaaggaagcaaaacaaccaaaaatttgattaacagtgaatggatctgttcagtatcatcttgccagctctcatggaatttgaaccaaaagaaactataattacggaactcagattccgtttggtcggagagtcgcacgcattggtttttttttttcgttattgtcaggaaaaaaaagagaagtattaagcatgaaagatctgaatcaatctcttaagctgctgactctttagcgatcttctctgcctttgcaaccacctcatcgatacctccaaccatgtaaaacgattgttcggaaagatcatcgtacttgccatccaacaaaccctggaaactgttgatattt

SEQ ID NO: 949 - DNA, 393 bp, Arabidopsis thaliana
  misc_feature (1)...(393): n = A,T,C or G
catttgcagattacatggagtcaggagactcgaatccagaagcattagggctctacctggtgcaagctatgaacaagcatggcatggagtcgtctacggtcacatggttgaacctagaatgaaaacccttgaaggaatcttcgaatgcacggaatcgcttacgcccatgcgaaaagccttcaaaggtacgttcatantagcaggaggatattctagagaagacgggaacaaggcggtggaagagggaagaaccgatcttgtggcttatggacggccgttcttggcgaatccggatctgacgaggagattcgaactcaatgagccgttgaataggtacgatagatcaacgttctacacttcagatcctgtagtgggctatacagactacccttt

SEQ ID NO: 950 - DNA, 393 bp, Arabidopsis thaliana
  misc_feature (1)...(393): n = A,T,C or G
ttatcctcccttgtccggtttctatgtggccttccacatcacctagattcaccatcaccacaccttatccacacccacgcgccgcctcttctttcttacaggtgaaagctttccaacgcggcgactttgaccgtttggctgataacgttaagtcaggtaaagcatggagagacgcgtggagaagcgctaacgatggattcgagcaattcgtttttgaggctaagaaaaccgctgagcgaattgatcgccaatacgctgtttctcgccgctttagctccgctgctagctcagccgctgaccgtgctcgtgagattgatcgtgagtttgggattactcctnnngttaggactgtctctgccgatttcagtagaaatttccctaagtacaggaagc

SEQ ID NO: 951 - DNA, 393 bp, Arabidopsis thaliana
cagaagacatggatactgtaagaagtgtgtttaaagttgacaagaacactcctggttctgatgtcgccgctgaaaccgccgccgctctagccgccgccgccattgtattcagaaaatctgatccttcttactccaaagtcctcctcaaacgagccatcagtgtttttgcatttgcggacaaatacagaggaacttatagtgcaggattaaaacctgatgtttgtccattttattgctcttactctggttatcaggatgaattgttgtggggagctgcttggttacaaaaagcgacaaagaatttaaaatatttgaattacataaaaatcaatggacaaatccttggagctgctgaatatgataacacttttggttgggataacaagcacgctg

SEQ ID NO: 952 - DNA, 393 bp, Arabidopsis thaliana
  misc_feature (1)...(393): n = A,T,C or G
cggccgcgtcgccccaagcgacttcctgtgaacttgaagaaaagtatcaacgcgacaaatataccgtatgatgatcacaaaggattgcagtttgcttcgattcttgaagtgagagtcagcaacggtggctctgtgtcttccttaggtggcaagaaactaagtgttgaaaaggcagactgggcggttctgcttctggcggcttcatctaactttgatgggccatttactatgcctgttgattctaagatagaccctgcaaaggaatgcgttaacagaatcagctcagtccnnnaatactcgtactctgatctttatgctcgtcatttgggtgactatcagaaacttttcaaccgggtctctttacacctttctggaagctcaacaaatgaaact

SEQ ID NO: 953 - DNA, 393 bp, Arabidopsis thaliana
ccgctcttcttgttcttgcttttgatttgatcaaacaaaacaaaacaaaacaaaacaaaaagacttacaaaaaaacaaagtaagctcaatttttcacaaaaaaaaatataattatatattcttacattacgaaaagacaaacgtatgaattatttacattagattaaaggaaaaaaaatgaattttaagagttggtgtgactagaaaaacttagtaccgttccccacctgcctcacttctcaacggcgaattcactccatttctcaacgttctccggtgattttccgttgaattcctcggcgacttggccgtgggagatggagacttggttgtcggagatggagacgaccggggatgattactttgttgttgttgatgatgatgatgatgact

SEQ ID NO: 954 - DNA, 393 bp, Arabidopsis thaliana
attgacttgagcactgtcgatgttagctatgtgagtagtcgttcctggtacttcttgaacttgtttggattaagaggcttgttcagtctcattctcggagatgaaaatgccattgatgacacacaacgtatgatgcaaatgggtgggtttggatttgatgcatcaaagagtctgggtgcagagaaggatggtttagacataatccagcacgaatgggcactacctcgatttgagcagcgcgcagaatctgtattaagaaaactcgtgaagtagagagaaacacgataaggttttcagtgaaatctggtttacttcactcgatgttgaaaacattcgaactttgtagaaacttttacttgaaactgagtcttaacagtgagttcttgtgtttca

SEQ ID NO: 955 - DNA, 393 bp, Arabidopsis thaliana
gagcggccgcccgggcaggtaccctttgataagtcaccatttatttatctttactacaagattcatcaccaaatcatgtaattactaatataaatatgcacaaagaactttaacatatcatcaccgtcgatcagatcgatctatgaatttttttctcagtaaagatcaagaacgtcaaagatcgaacggttacaaagaggacacgtcccacgattcatccaaatctctcttgaacaaactctacaatacgtatgtccacagggaataaaagccgcacctttctctcttcccatacacacacaacacagcggatcattacccaaccacgtcgtcgtcgaatcacaaccgtccgattccgcaagcaacctcatcaacggtacctcggccgcgacc

SEQ ID NO: 956 - DNA, 393 bp, Arabidopsis thaliana
tttggtctaaaaagtttggagtgctgtataatgattcaaatttgtaccaatatagtaatgtacaatcaattttggaggtcacactgataacaacgatatgaaagaatgaggaaaaactgttttcccatgatatctctcttttgtctacacagcttcccgtgcaaggtcacaaacttgctctagctgacccaagtcatcatgctcctgtatggtgaatcgatcctacaagctgtatgtatcttccaaaaactcgggttacctctgtttcctatagtgtacaaagactataaactcgacgcagattcttctatgtcttgatgcactgtagcattcttcaatgtatgacatcggaatcttgactgttttcgggtactgtatcactgctatcttaag

SEQ ID NO: 957 - DNA, 393 bp, Arabidopsis thaliana
  misc_feature (1)...(393): n = A,T,C or G
ctcaggggtggccaatggctatgaagggacgtgatcttatcggcattgctgaaactggntctggaaagactctttcttacttactacctgctattgtccatgttaatgcccaaccaatgttagctcatggtgacggcccaatcgtcttggttcttgctcccactcgtgaactggctgtgcagatacagcaagaggcatctaaatttggttcatcctcaaaaattaagaccacttgcatttatggtggggttccaaaagggcctcaagtgcgtgatctccagaaaggtgtggagatcgttatagctactcctgggaggttaatagacatgatggagtcgaacaacacaaacctacgaagggttacttatcttgttttggatgaggctgatcgaa

SEQ ID NO: 958 - DNA, 393 bp, Arabidopsis thaliana
atttactcttgcaattttattatatgaaatgaaaagcataaccaaaaggatagattgcattggaatcaaatgaaatcggaacaaacaaacaaaagaacattttcaagggaaaaaattccaaataataaattgattaaagtgacctcttatataatgcatgcaaaatcataatcatcatcatcataatatgatcatcacgatcagtatttgggagtggcgggggcagccttgggaccagtgtagtagaaaggtccgacgctaaagagctccaagttcttgtccgggtagaaacggtatccgtacaacgccaagggaactcctgtgagacccttgttaacattggtcgggttcttgcaagtctcgaccggagataagtagagcttgacacgacag

SEQ ID NO: 959 - DNA, 393 bp, Arabidopsis thaliana
  misc_feature (1)...(393): n = A,T,C or G
tttttttgacaaatctttgttttcttacttttggtaaactgttactacttgtgaatttcaatgagataccaaggttcaaaagataaatattgtctaaancagtgatcagaacagaaagaagaaaanaaactcagggcaaacaatctttcccctttgtagacaaaaangaaaattcgagtttgaatctaaactatgcttgctgcagtatcctatacggggctatcgaaattggcagattgtcaccaggcctttgcttagccttcagtatgcaaattgggtggttgaattatagaacccaagaatttggttgcatctgcactgatcttgcgttgcttgtcatctatatatattcggcatgtgaacctttgtttctgtcttttcaagagatgattg

SEQ ID NO: 960 - DNA, 393 bp, Arabidopsis thaliana
cgcggccgcttcactccaatcttcaattcgccgtgtcagatccgacctctctgaaccgatcaaatcgatccgatctaaatctgttcagctatctaatctccatacagctactgagttactatctcactccgttcgtacgcttcgtctctctaagaagcttcgagatctagcggattttcctgatccagataagatcgatctcactaaagctgcacagttccatttcgagatcttaacaatgtgtaaagagtatgatctctttggcattgatgtgattgatgaggaaatcaagtttgttactgagattggagagaaattgagatctgaagctatgaaggtgttggagagaggcatggaagggttgaatcaagctgaagttgggactggtttgca

SEQ ID NO: 961 - DNA, 393 bp, Arabidopsis thaliana
  misc_feature (1)...(393): n = A,T,C or G
ttttttttaatttaaaaggacaaggagatattttatctttcaaataagtgtaagaatgtagattgataatatgattttcaaacaagtcttgagaaagtttattgaatgcttacttaagtaaagaaggaaacaattctcatgaaccagtcacgtttgtgtgaaaccagaatgtggccgatggtgagtccacacacaacaccaggtacgtagcctattgcagctgctatccagctaaatacttgatcttcctcttccttgtcttcatcttgttcttgctttgttgcttcttcttctccaccacatttttnnnggagaggagcaccgcaaagcccgggattctctgtgaaagaagaactatcttgggtttgaatctgagtggtttctggtattgga

SEQ ID NO: 962 - DNA, 393 bp, Arabidopsis thaliana
ccgcccttttttttttttttttttttttttttttttttttttttcttggttgaagccgatactcaaataacaatgtcaacaatattaaggtctaacaaagtaatgtttacacagaattacagaacaatcagctgaccatattaaatcttacttaaatgaatttcgaaaaaaaacagtggaaactgctgtgaagtgagctgtttagtcattagcactgactcatgagaccagcaaaaaaatgttgtctttgagtgaagagaagacctgattgttgactttcaaagacaacacatgacaatcaatctgtttggtaagctcatggcgtttagtagttatgtgaatatccatccctgattttcacagtacagtgtgcagtatcttgtatgatgaagc

SEQ ID NO: 963 - DNA, 393 bp, Arabidopsis thaliana
cctctagagcggccgcccttttttttttttttttttttttttatatgaaaactggtttatatgaatccaaaaacataagtcaaagtttaacacatatctctctgttcttcatgttgtaataaaagggaaaaagaatcattccctagtcagacaaattcaagagcggcagatacataacaactcttgaatgtacaagaaaactaaaaagacaaattctttttgttgttagaagaatcaactctccaaacattaccagaccatcaaagagtatattaaaatgtacgaagatctaccaatctttattcaaggctggtgatgaaatgattcggaaggcggatcattgcgtggaacgttaggttcaggagacactaccgggatatccaagctgtttct

SEQ ID NO: 964 - DNA, 393 bp, Arabidopsis thaliana
  misc_feature (1)...(393): n = A,T,C or G
gttggaacagaaccagtttcatctctttgtttcaagacaggtaatgagaacattctctatgcttcttgtggaaacgaaatcaagtctttcgatgttcatacgctaagtgctacttcttggaagccattagagagttacaattacaacaaagatgaagttaaccaggtagtatgtaacggaaggtcgtcttttcttgcttctgcagatgattccggcgatgttaagatcatcgaccttggtcagaaatgcctttataaaacccttagagctggtcacacaagtgtatccttacttcgttttttttacccattctcgtctatgaaactctactagnnnnnaaaaaatgtctcaaatcaacaccttaatgagacatataagatatgtagttctgta

SEQ ID NO: 965 - DNA, 392 bp, Arabidopsis thaliana
ctggcgcgcgagcggccgcccgggcaggtgtagcttcactaattccacatactcagagagaaatggcaaccgaaaccgtattagccacggcggtgagcaatggcaaaagcaaaggatgttgcaagtccggtccaggttacgcgacgcctctcgccgccatggccggtccacgggaaaagctcatctatgtcactgccctttactccggaacggggcgagacaaaccggactacttggcaacggtggatgtggatccaagctcacccacattttcaagcgtcattcacagactaaaaatgccatatataggagatgagcttcaccacactggttggaactcttgcagctcttgccatggtgatgcttctgctgatagacgttaccttgtctta

SEQ ID NO: 966 - DNA, 392 bp, Arabidopsis thaliana
  misc_feature (1)...(392): n = A,T,C or G
aaagttggtagaatctgatgagttgtgtatatgttggtggtgttccggctgttgatgacggaggctccactgaggaggcaacgacggctgcaaggacttaaccagatgaatccaaaatgtgtggtaagaccgctgaaatagtagatggtcggtctaattgcgccggctccaccgccagtaaggatccgaaagttaaacaggcaaaggtctgggagaactctcatggaacaggaatttcaactgtgtgaaccggtagnatccatattgtgaggatatcagaaatgaacaatgatgggtctgtgaagtcatctaaagatgaaatggtgtggaagttgcatgtcccaattacggaatttgcagcacagcagcaaagaatccttgatttgaagttc

SEQ ID NO: 967 - DNA, 392 bp, Arabidopsis thaliana
  misc_feature (1)...(392): n = A,T,C or G
cacgcgtccgaatatctctctctctctctctcgttgagtgtgtccatgaaataatactctgccagagacagagagaaagactgtaacggaggatgtggtggcgaagtggccacactgacacactggtttcatgatggtgaaccacaacaatggccagcgacccactgatattgattctcgtctccgacagacagaacaagataagctcttgttccatgactttttaggctccaagaatcctactttagcatccacttccatggctgaccataggctaccaccggataataaggcggctaaagcggcgatgactccttccacggctnctgcttnntccgccggtggactcggcggtctctcctcaacctccgatctcgtcgaaagacacagcg

SEQ ID NO: 968 - DNA, 392 bp, Arabidopsis thaliana
ttcggattgcttccccttactccgttcggcttctgtcagtaaaacctatttcaaatgtcgatgatgcgaagtttcgatctcaggaagaagaagatcagtccagttacgatcagaaaacagtatgcgaagctctcacatgttacagcaacgattggcaaaaggcgttggagtttttcaactgggtcgagagagaatccggattcagacataccaccgagacattcaatcgggtgatcgatattctgggaggctattgatgcgtatgataaattggatgatttcaatttgagagatgaaacatcattttataatctggtcgatgcgctttgcgagcataaacatgtggttgaagctgaagagctttgttttgggaagaatgtcattggtaatgg

SEQ ID NO: 969 - DNA, 392 bp, Arabidopsis thaliana
aaaaagaatctggggaagtaagtgagatgaaggaagaggaggagatcggaaaaccagcgaaaccaaaagccaagaaagatgttgctcctgggaggttgattgatacctatgctgcacagtgcgataactgtcacaagtggagggtgattgatagccaggaggaatatgaagatatcagaagtaaaatgctcgaggatccttttaactgtcagaagaaacagggcatgtcttgtgaagagcctgctgatattgactacgattcttctcggacttgggtcattgacaagcctggtctccccaaaacgcctaaaggtttcaagagaagcttagttctcagaaaagattactctaagatggatacctactactttactcctaccgggaagaagctc

SEQ ID NO: 970 - DNA, 392 bp, Arabidopsis thaliana
tcaaggctgagtacccgattttcgacaaggttgatgttaacggtgacaaagctgccccagtctacaagtttctgaaatcaagcaaaggcgggctctttggagacggcattaagtggaacttcgcaaagttcttggttgacaaagatggaaatgttgtcgatcgtttcgcaccaactacctcacctctcagcattgagaaggatgtgaagaagttgttgggagttactgcttaagcaaggcaagattgcataattagacaaataaaagctcattagtattgtattaccaatactgtgtagtaagctgagttcgtgagtgtgtgcctttgggaccgcgtacaattataatccgttttttagcggccaaactatgtaataatcgtagatctaaat

SEQ ID NO: 971 - DNA, 392 bp, Arabidopsis thaliana
ttctggcgctcgagcggccgcccgggcaggtgaagaagagaaacaacaagaagaagtaatggcttcctctatgctctcctccaccgctgtggttacctccccggctcaagccaccatggtcgctccattcaccggcttgaagtcatccgcttctttcccggtcacccgcaaggccaacaacgacattacttccatcacaaacaacggaggaagagttagctgcatgaaggtgtggccaccaatcggaaagaagaagtttgagactctatcttacctccctgaccttagtgacgttgaattggctaaggaagttgactaccttctccgcaacaagtggattccttgtgttgaattcgagttggagcacggatttgtgtacctcggccgcgacc

SEQ ID NO: 972 - DNA, 392 bp, Arabidopsis thaliana
ccacgcgtccgcataaccctcctcttgctctcgccaagatcgatgctagtgaagaagcaaacaaagaatttgctaatgagtacaagattcagggtttccccactcttaagattttgagaaatggagggaagtcggttcaagattacaacggacctcgtgaagctgagggtattgtcacttatttgaagaagcaaagtggtcctgcttctgttgaaattaagtcagctgattctgccactgaggttgttggtgaaaagaatgttgttgctgttggagtgttccctaaattatccggggatgagtttgattctttcatggcccttgctgagaaattgcgtgctgactatgatttcgcacacactttggatgctaagtttcttcctcgtggagag

SEQ ID NO: 973 - DNA, 392 bp, Arabidopsis thaliana
cgcgtccgctcgtagactcttacagtgattaactcaggctgctaagggagatggcaacggcgatggcggaggatacgagcttcgagggagaccaactagcttccatgactactgatgacatcggtagagcttctcgtctcttagccaacgagattcgcatcctcaaggaagaatcgcagaggacaaaccttgatttggaatcagtgaaggagaaaataaaggagaaccaggagaagattaagcttaacaaacagcttccttacttagttggcaatatcgttgagattcttgagatgagtccagaggatgatgcagaggaagatggagcgaatatcgatctggactctcagaggaagggaaagtgtgtcgttctaaaaacatcaactcgtcag

SEQ ID NO: 974 - DNA, 392 bp, Arabidopsis thaliana
tcgagcggccgcccgggcaggtaccagttactatacttgcatttgtctctagttgtttcttgatgaaacttggtaagtattttggatgatgtgaaagatcagcatccatgatcacgacgaaatcacccgtagcatgcttcaaaccatgaatatatgcagttcccaaaccaagcttcttggctctagctcttaaaaggatacggtcttcaccatacaattgctgcagttgcttgacaatttcctgtgtgccatcaggactcccatcatccacaacaattatctcaaaatcaacgtcccggagatgcttgaaaatcaggtagactatgatagcgatgttgaggcgctcgttgtaggtaggaatgattatgctatacttgtacctcggccgcgac

SEQ ID NO: 975 - DNA, 392 bp, Arabidopsis thaliana
tgaacagattcgcatcaaaccctaagaaactgaagatgaggccgatcctgatgaagggacatgaacgtccattgacgtttctgaggtacaacagagaaggagatctgcttttctcctgcgccaaggaccacacacccaccctctggtttgccgataacggcgagcgccttggaacttaccgtggtcacaacggtgctgtttggtgctgtgatgtctcccgagactcgtcaagattgatcactggtagtgctgatcagactgcaaagctgtgggatgtaaaatctggaaaagaattgttcactttcaagtttaatgcccctacgaggtctgtggatttcgctgttggagatcgtcttgcagtgattaccactgatcacttcgtggaccgtacc

SEQ ID NO: 976 - DNA, 392 bp, Arabidopsis thaliana
tcgagcggccgcccgggcaggtacaagctacctccagggccatcaccacttccggtgatcggaaacctccttcagcttcagaagcttaacccacaacgcttcttcgctggatgggccaaaaaatacggtccaatcttgtcatacaggataggaagcagaacaatggtggtgatatcttcagctgagctagctaaagagcttctcaagacgcaagatgtcaactttgcggaccggcctccacatcgtggccatgagttcatatcctacggcaggcgtgacatggcattaaaccactacacaccgtattaccgagagataaggaagatggggatgaaccacttgttctcaccaacacgtgtggccacctttaagcttgtacctcggccgcgacc

SEQ ID NO: 977 - DNA, 392 bp, Arabidopsis thaliana
  misc_feature (1)...(392): n = A,T,C or G
ctttttttttttttttttttttttaggagttgcaacatctgaaagtttcgcatttggcgtctctgcactgtcctgctaactgctgcagtacatgtgcgttaaacgagaatctgtgttgctataaatccagatacattatctcggccattaaacgtgaacaaccaaacaaaagcaaagaaaaaagatggttaccaatctaaaccagttgctgctagttggctcctttatgaaagagtgaataaaaaaattggagtccggaggaagaatgcatagaancaacaatgaaaatggttaattgtctaactaagttgagaaatatcaacctcatcagnnnncttgaaggtatccgcagcaccaaactttctaaattcttcgccttcagccactgagtc

SEQ ID NO: 978 - DNA, 392 bp, Arabidopsis thaliana
  misc_feature (1)...(392): n = A,T,C or G
ttttttttttttctttaacctttaaattggcaaaatactatccaaggttcattaagggcatcaacgatgaccaaacacaaactagagtcacagtgaaagcaattttcaagaatccggaccaattatcatcttatcattttgctttgagttcttgattttccttgatattatcttcttcgtttgacattgcttctctgttttcgtctggacaatggtttacacctgcgtctatctctggtccctttagaatgatttnnnctcttccgtttcttagaactcgcattattctcctctgctatgacttccccaaccaaatcatcttcgaccattttacgaacgagaacatataatctaggttctgatgaactcggctctagaaagatctgtttttg

SEQ ID NO: 979 - DNA, 392 bp, Arabidopsis thaliana
gcggccgcgcaacagtctggttatgcttcttctggctctgactactctcctcctagcttaaactctgatgctcaggaccgcactggaaagatagtctttaaactacttgataaagatccaagtcagctccctgggactctacgatctgagatctataactggctttcgaacattccatcagaaatggagagttatatcaggcctggctgtgttgttctatctgtttatgtagcaatgtcacctgcagcctgggaacaacttgagcaaaaattgctgcaacggcttggtgttttgctacaaaattctccttctgatttttggagaaacgcaagatttatagttaacacgggaagacaactcgcatcacacaaaaatggtaaagttcgatgtag

SEQ ID NO: 980 - DNA, 392 bp, Arabidopsis thaliana
  misc_feature (1)...(392): n = A,T,C or G
tgtaaccttgatcaagcagggtcagtatctcgttgttggaaatgttggggattccagagntgtaatgggtacaagagacagtgaaaatactcttgtcgctgttcaactaactgtggatcttaagccaaatctcccagctgaggcagagagaataagaaagtgtcgaggacgagtgtttgctcttagagatgaacctgaagtttgtagagtttggctgccaaattgtgactcacctggacttgctatggcacgtgcttttggtgacttttgccttaaagattttggcctaatctctgtgcctgatgtatctttccgtcagttaaccgaaaaagatgagtttatagtgttggctacagatgggatttgggatgttctctcaaatgaagatgtag

SEQ ID NO: 981 - DNA, 392 bp, Arabidopsis thaliana
acgttttcgttttgaaatggcgaggaagaagatcagagagtatgactcaaagaggttggtgaaggaacatttcaaaaggctttctggcaaagagcttcctatcagatccgttcagattaatgaaacaactgatctaaatgagctagttgaaaaggaaccttggctctcgtctgagaagctggtggtgaaacctgacatgttgtttggaaagcgtggcaagagtggtttggttgccttgaaattagattttgctgatgttgccacttttgttaaagaacgtttgggaaaagaggtagagatgagtggatgcaaaggacccataacaacattcatagttgaaccatttgttccacacaatgaggagtattatctcaatgttgtctcggatcggc

SEQ ID NO: 982 - DNA, 392 bp, Arabidopsis thaliana
ctttctcaacctaactgcgcctttcttcaccttctttggtctctgcttcttcttgcctcctttttacttcttcaagttcttgcagtctattttctcgacaattttctctgaaaatctttacgggaaagttgttctcatcactggtgcttcctccggtataggcgagcaattggcatatgagtacgcatgtagaggtgcatgtttagccctgaccgcccgaaggaagaaccgtctagaggaagtggcagagattgctcgtgaactcggatctcccaatgttgttaccgttcatgctgatgtctccaaacctgatgactgtagacgaatcgttgatgacaccatcacccattttggcagattggatcatcttgtaaataatgctgggatgacgc

SEQ ID NO: 983 - DNA, 391 bp, Arabidopsis thaliana
  misc_feature (1)...(391): n = A,T,C or G
aaaaaaagtatgataaacaaccactcaaaggtaacaaaatcttattacaaattgaaataatacaataatgcacgaatcgatatacaaatatgaaaaaaacaaattcaaaacaagaaaacttgcaagttacaacaaatagaaccattaataatacagtactcacactcacaacgacaacgtacgttctcgtttattattcgatccacatatatacgccaaagtaaatactaacaaaacgacatcgtcccattatccgcagcaattaagagctttgtttcttcttatgggcacttgcggcgtccaccgtgggtggtgaggctagcgtnnnnctggcacttgtcgtagtttccgtacgtacccggaggcacacagttgcacctgtagcagcaag

SEQ ID NO: 984 - DNA, 391 bp, Arabidopsis thaliana
tttttttttttaaggtaatacaatatattcaacggtggatcattacaagcacaccgattattcattaaatctctaagaattcaaaaagaattcggtaaataactttcccaaaaaaacactaatatttgatgtaagcaacagaagaagtgttggcatctttgataagtgtaccaagcagaggagcaagcaaacatttcttgtctttctctttgtagaagtaacccaaacacttgcaatcacgatcgcacttggccttgcaatcgttcacagaagttgggccttgtccatcattaacataaggcccagtaaaatgctcaacaccgactatcttataataattgacagttttacccttgactccgctgcaaaactgcgtcgttataggtggtgc

SEQ ID NO: 985 - DNA, 391 bp, Arabidopsis thaliana
tttttttcctgtaatgtttcctggtgttataacgatgtgtacaacacttttccacaaaccaaaagctacaaactaagacaccagaaagcttaatcagtaaattggtacaagtttttatcaaaatcaaatcttctgaattctttagttaaacgtttcttctcatgtatgcttttgttctgtaaaatagtatcagcagcattgtccattgtataactctggctcattgctatattctgaactcgttagcagatttacccttttcccctcttcttcttcttcttcttcttcttcttctctttcttcagtggcctcagtctcgcactctttatcggaatctgccatatggtcgaagaaatcaccaaaataccacttacaatcttctttccattcg

SEQ ID NO: 986 - DNA, 391 bp, Arabidopsis thaliana
  misc_feature (1)...(391): n = A,T,C or G
tcgagcggccgcccgggcaggtggcaagtctctccatctccgccgtgtctctgtcgccgtttcggcctcaaacagagaatcgtctttcaaaactcagtttccaaacgaacttacactcgttcaatctcaaaccaataaggattagtacgaaagttagaagttttggtgggaatcggagagagccgaaggattcaagatttgtcgatgaaaatggcgtagttgatgaaatggaaggtttcttagacaatctctctctcgaatacgactccgtttgggacactaaaccctcttggtgtcagccatggacgataatgttaacaggtttttcaatagtggcntgtagctgggtaatactacattcggtcatagtttcgtcgcttgcggttggtgt

SEQ ID NO: 987 - DNA, 391 bp, Arabidopsis thaliana
tcgagcggccgcccgggcaggttacagctacttcattggctaagatctcggaaaaagtacttggtgttggcatattagaagcagccaatagagaactttataagccagaggatttggccaaagaaattactactcaagcaaagcctgtgaatagaattggttttattggtcttggagcaatgggttttggcatggcagcacacctgttgaaatcaaatttttctgtctgtggttatgacgtatacaagccaacacttgtcagatttgagaatgccgggggattggcggcaaattccccagctgaagtgacgaaagatgtagatgttcttgtaattatggtaacaaacgaggttcaggctgaggatgtcttgtatggacatcttggagcggt

SEQ ID NO: 988 - DNA, 391 bp, Arabidopsis thaliana
tcgagcggccgcccgggcaggtacagatttctcttgccgggaaattgcataagagaaagcgaatgatcgttcgaatcttcaccacatagagtcttacttctcattcatcttaagacctctacattgagaggaaacaaaggctggcttgaatcctcctcgggactaataacacttacacaactgatatataatctctgcaattttgtctgaggcgtatcggtgtcggtgaatgctgcagagtttttcatcaggcacttcgagaggattattaaagggtgaaagattattgtatatagatagacctctttgtttcttcaggattctgatttcgcatcaggcatgaaaaccttcattctctgtgactgtgcatcatcaaacatgagtttctatt

SEQ ID NO: 989 - DNA, 391 bp, Arabidopsis thaliana
  misc_feature (1)...(391): n = A,T,C or G
tggcgtcgaatcaaagatgcatattatggatgttttcctttgggggaaatgcttaagtgaagaagaggccgcttctttgcatgcagccattggcatggctgacttagacatgattgatttgtctgatgacaattggcaatggacggattcaccccccagagtcgatggttgggatagtgatcctgccgatgttgatctctatgatagggatgacgtagattgggatggacaatattccagtgggaggaaaagaagatcaggtcgggattttgtaatgagtgtcgattcctttgccaggagacacaggaaacccngnatggagacacaagaagatataaatcaaagaatgcgttcagttgagttggctgtcaaagaagctctctctgcacga

SEQ ID NO: 990 - DNA, 391 bp, Arabidopsis thaliana
cgatttcttacgcgctctttttgtggcgactgttgtatacgcgcgagccttcatggacacgaaggcggttggagtttctaaggatacggcggcgtcgatggaagcgtcgacggtgtttcctgggtttaaattctcgccgacggatgtggagttgatttcgtattacctgaagcggaagatggatggcttggagaggtccgttgaggttataccggaccttgagatttacaatttcgagccttgggatttacccgataagtcgattgtgaaatctgatagcgagtggttcttcttctgtgcgcgtgggaaaaagtatccacatggttcacagaacaggagagcaacgaagatgggatactggaaagcaactgggaaagagcgtgatgtgaag

SEQ ID NO: 991 - DNA, 391 bp, Arabidopsis thaliana
tttttttttttttttttaacaacagaagatgatcagattctagttttcacaaagatgatgtttttttttgtttcgtttaaaacaagacccacttcatttggtcctgtcttcagaaagttaaaaggacacaaagagatgtctatcgaatcatacatagaaattaaggcagatttttttcttcataaagagataatttagtaggtgggattttccatttagcccatggcatacttctgagtccagcttcgtgcagtggactcgtacttgttcttgtcagtcttgtacatgtgagctatctcgggcaccaaaggatcatccgggtttggatcggttaacaaagaacagatcgatagcagcaccttggaaatggtgagcgcaggactccactgct

SEQ ID NO: 992 - DNA, 391 bp, Arabidopsis thaliana
tcgagcggccgcccgggcaggtctgtgtctctcttccccgttagtcttcgtcgtgacctttttgtagtattaagcaatgaagattaagacgttatcaagatcggttgatgaatacactcgagaaagaagtcaggatcttcagagggtctttcacaacttcgacccaagtcttcgacctatggagaaggccgtggaataccagagagctcttacagctgccaaattagaaaagatatttgcaaggccgtttgttggagcaatggatggtcatcgtgatggagtctcatgtatggcgaagaacccaaattacctcaaaggaatcttctctgcttctatggatggagatattcgcctttgggatatctcttcaaggtgtacctcggccgcgacc

SEQ ID NO: 993 - DNA, 391 bp, Arabidopsis thaliana
cacattacattattataacttaaaagaatgtcaaataatatgcacgcatccatacatagattatataggttataggatgatacaaccatacatgaggatgtatatcctcataattcaacttattatggaacttgattaaaagagtaatttaagggaaagcaacattagaatttggagatgaaatcaaggataatttggagaatctcctgaggcttttcttggttaatgaagtgagccactccttccatgaccacaggctcttcaagcaaaggcacatcttccttaaactggggaccatgtatatattccttcacaccaggcatatagtagaccagatcaagctcccctatcacaaactttgtaggaacctggattttgcttcccacccatg

SEQ ID NO: 994 - DNA, 391 bp, Arabidopsis thaliana
ttaaaaccaaagccacagcttgtccaacattattgtttcgtgaaacgaattggaccaacaaaatcctacaaatgaaatgaggaatgttttggtgtatagagagaaacattacttaatctcacttgtttctggtgatgactctatgggtcaagtcaataagtgcccgcctcgatcttttgacatcttcattgtctgtttcaggtagagacccgattgcagctgctgctagattcgcatgttccatggctaattctcttgccctctgtattcccttgctcttcccaagatactctaaagcaatgtcaacattcctaggatctttttcaacttgatcaacaacttcgcgtagttgaggaaactcttccatggcaaagaggattggggctgttat

SEQ ID NO: 995 - DNA, 391 bp, Arabidopsis thaliana
ccacgcgtccgcccacgcgtccgagcaacacaacactgagctagtggttggtatggtgaggcaacaatttaagaaacacatgaatgagacagaccctgagaagattcagaagcttaaagatgatgctgctcggggactcatcaatcacatgttgtttgagtcagcgaagctgacaggaggcaaggttagccagagatcctgatgcagtctggttgcagactctcccattgttattctctctctatctctctagtcaatgcttgtaggctaacaatgcaactaagttggcttgaataatagacttgatcgagaagcctcagtgactcaacattgaggattttcctgtgcaatcaatcaagtggttctctaaaaaaaaaaaaaaaaaaaaaag

SEQ ID NO: 996 - DNA, 391 bp, Arabidopsis thaliana
tttttcgaatcttagcgacaaagggctgaatctcagtggatcgtggcagcaaggccactctgccacttacaataccccgtcgcgtatttaagtcgtctgcaaaggattctacccgccgctcggtggtaattataattcaaggcggtccgaacgacgcttccgccgaacggacttagccaacgacacgtgcctttgggagcctaagctcctactgagggtcggcaatcgggcggcgggcgcatgcgtcgcttctagcccggattctgacttagaggcgttcagtcataatccagcgcacggtagcttcgcgccactggcttttcaaccaagcgcgatgaccaattgtgcgaatcaacggttcctctcgtactaggttgaattactatcgcga

SEQ ID NO: 997 - DNA, 391 bp, Arabidopsis thaliana
catccacccatgcaacaaccaaccatgtttatgccacaccaagctcagccagctccgcagccatcttttactccagctcctacaagcaatgctcagccatccatgagaactacatttgttccttcaactccccctgcactgaagaatgcagatcaatatcagcagccaaccatgagttctcattcattcacgggaccatctaacaatgcataccctgttcccccgggtcctggtcaatatgcaccttctggcccttcacaacttgggcaatatcctaaccctaagatgccccaagttgttgctccagcagctggacccataggatttacgcccatggcaactccaggagttgctccaagatctgtgcaaccagcaagtcctccaacacagc

SEQ ID NO: 998 - DNA, 391 bp, Arabidopsis thaliana
  misc_feature (1)...(391): n = A,T,C or G
acaacgaaaaggaacttctctttttgtttggtgactgaatcggtggaaaacaacacaagtttgttcctttttgtctctccagatcccttggcttccttcttcttcttcatcctcctcgtgagactctgtgttgaaatttctctagggttttaattatcggcgttggtttttcgtttttgagaatttgatttcgtttttagaaataatgggtgattgggctcaacttgctcagtctgtgatcctaggtttgattttctcttaccttctcgctaagctgatctcgatcgtcgtcacgtttaaagaagacaatctctctcttactcgtcacccngnggagtctcaattggaaattaaaccggaaggagttgactcgcgacgtctcgattcctct

SEQ ID NO: 999 - DNA, 391 bp, Arabidopsis thaliana
cgcccgggcaggacccatcttgccactcaaagttgtccatcaacgaccacacaaagtatcccgtaacgttcactttgtccttgcaaatggcgtcgtgcatactcaagagatgcctttggatataatatttcctgttgtgatcttgtgtcccaaagtttacgtcattgtgcttctctccaaggtcttcaccgtatccattctcggcaatgataacttctgggtcgccatagttatccttaatatacttcaaaaggtatctcaaaccttttgaatacacatccagtttaccattaaacggcttgctaccaattttgtatccatccacactcttgctatcccaatcaacaagagaatcagtagtccaactaggattcttaggatcagggctaat

What is claimed is:

1. A nucleic acid comprising a sequence capable of hybridizing under stringent conditions to a sequence set forth in SEQ ID NO:1 to 999, or a fragment thereof.

2. A vector comprising the nucleic acid of claim 1.

3. The vector of claim 2, wherein said vector comprises regulatory elements for expression, operably linked to said sequence.

4. A polypeptide encoded by the nucleic acid of claim 1.

5. A nucleic acid comprising: an ATG start codon; an optional intervening sequence; a coding sequence capable of hybridizing under stringent conditions as set forth in SEQ ID NO:1 to 999; and an optional terminal sequence, wherein at least one of said optional sequences is present, and wherein:
ATG is a start codon;
said intervening sequence comprises one or more codons in-frame with said coding sequence, and is free of in-frame stop codons; and
said terminal sequence comprises one or more codons in-frame with said coding sequence, and a terminal stop codon.

6. The nucleic acid of claim 5, wherein said nucleic acid is expressed in Arabidopsis thaliana.

7. The nucleic acid of claim 5, wherein said nucleic acid encodes a plant protein.

8. The nucleic acid of claim 7, wherein said plant is a dicot.

9. The nucleic acid of claim 8, wherein said dicot is Arabidopsis thaliana.

10. The nucleic acid of claim 7, wherein said plant protein is a naturally occurring plant protein.

11. The nucleic acid of claim 7, wherein said plant protein is a genetically modified plant protein.

12. The nucleic acid of claim 5, wherein said nucleic acid encodes a fusion protein comprising an Arabidopsis thaliana protein and a fusion partner.

13. The nucleic acid of claim 5, wherein said nucleic acid encodes a fusion protein comprising a plant protein and a fusion partner.

14. A transgenic plant comprising an exogenous nucleic acid, wherein said nucleic acid comprises transcription regulatory sequences operably linked to a sequence capable of hybridizing under stringent conditions to a sequence set forth in SEQ ID NO:1 to 999 or a fragment thereof, wherein said sequence is expressed in cells of said plant.

15. The transgenic plant of claim 14, wherein said plant is regenerated from transformed embryogenic tissue.

16. The transgenic plant of claim 14, wherein said plant is a progeny of one or more subsequent generations from transformed embryogenic tissue.

17. The transgenic plant of claim 14, wherein said sequence capable of hybridizing under stringent conditions to a sequence set forth in SEQ ID NO:1 to 999 encodes a plant protein.

18. The transgenic plant of claim 14, wherein said plant protein is a naturally occurring plant protein.

19. The transgenic plant of claim 14, wherein said plant protein is a genetically altered plant protein.

20. The transgenic plant of claim 14, wherein said sequence expressed in cells of said plant is an anti-sense sequence.

21. The transgenic plant of claim 14, wherein said sequence expressed in cells of said plant is a sense sequence.

22. The transgenic plant of claim 14, wherein said sequence is selectively expressed in specific tissues of said plant.

23. The transgenic plant of claim 14, wherein said specific tissue is selected from the group consisting of leaves, stems, roots, flowers, tissues, epicotyls, meristems, hypocotyls, cotyledons, pollen, ovaries, cells, and protoplasts.

24. A genetically modified cell, comprising an exogenous nucleic acid, wherein said nucleic acid comprises transcription regulatory sequences operably linked to a sequence capable of hybridizing under stringent conditions to a sequence set forth in SEQ ID NO:1 to 999, wherein said sequence is expressed in cells of said plant.

25. A method of screening a candidate agent for its biological effect; the method comprising:
combining said candidate agent with one of:
a genetically modified cell according to claim 24, a transgenic plant according to claim 14, or a polypeptide according to claim 4; and
determining the effect of said candidate agent on said plant, cell or polypeptide.

26. A nucleic acid array comprising at least one nucleic acid as set forth in SEQ ID NO:1-999 stably bound to a solid support.

27. An array comprising at least one polypeptide encoded by a nucleic acid as set forth in SEQ ID NO:1-999, stably bound to a solid support.
